United States Patent Application Publication US 2026/0191916 A1 - sequence listing, part 10

SEQ ID NO: 12 - DNA, 3944289 bp, Blautia wexlerae (residues 1-1,972,145 of 3,944,289)
  source 1..3944289: mol_type = genomic DNA
gaaaatggttactctttgcgggaattgtgttataatagtctttgatttattgttgctgaaaaaagtgaacagtttatagcgagcctattaaatgcattatttacgaggactgctatagtaattatacaaaaccgtaagagggggatgaacatttgaaaaattttgaagaaattatgtcggaacgaaaaaaccgtatagaagccagaaaggacgagctgatccgcaggagtctgctgtctgaagaatttctggaaatgatccagaaaaataaaaggccctttgatctgctgatgtcttactatcagtgtgctgtcatggagattgagacaaaattcagagtgctgaatcaggagtattccctggaatatgataaaaatcctatcgagggtattaaaaccagaattaaatcttatgacagcattgtgcggaaaatacgcagaaaaaatattcccatgtctttaactgctatagaagaaaatatcaaggatatcgcaggtgtccgggtaatctgttcttttccggaggatatctatgagttggcagacagctttctgcgtcaggatgatattgtactgatcgagaaaaaagattatataaaaaatccaaaacccagtggttatagaagcctgcatctgatcgtgcaggtgcctatctttctgcagaaaaacaaaaaaatggtaaatgtggaagtccagtttcgaactattgccatggatttctgggcaagtctggaacataagcttcgctataaaaaagatatcccggcagatcaggcacagcaattgcaggaggagcttctggcgtgtgccacccagagtgctcagttggataaccggatgcaggaaattcgtaatcaactggtcagcagagctgataaggggaatcaatcctgagaaagttccttatttcaggaacttcctcaataatttttcataaatttttctatatggctggtatctcattggcagatccagccatgtttttttgtctacaatactcttatagtgggagaaggtatgaaaaccgtctttgccatggtaggaacccattccgctttcaccaaagccgccaaatcccatctcactggttgccaggtggatgatggtgtcattgacacatccgcctccgaatccacagtgggaagtaactttttccgcagcttctttgtcggaggtgaagatatatagtgccagaggatgtgccatggagttgaccttttcgatggcctcatccagggaatcataggccagcacaggaagcacaggaccgaagatttcctcctgcattactgcatccccgaaggttacattatccataacagtaggagcgatctgaagagctcccggattgttgtcaccgccacagactaccttgctgggatcgatcagattgcagatacgagtaaagtgtttttcattaataattttcccataattcttattattcagaggtgtggaaccaaactgtttcctgatctgtttctggatctgtcggatcagttcatccttgatttctctgtcgcagtaaatataatcaggtgctacacaggtctgaccacagttgagatattttccaaatacaattcttctggctgcaagtttcaggttggcatttttctctacaatgcaggggcttttaccgcccagctccagggtaaccggggtcagatgtacagatgcttttgccattacttccctgccaacatgctggcttcctgtaaagaaaatatagtcaaaatgttcattgagaagagtgttattttccgcacgtccgccgtttaccacagccacatactggggatcaaaacattcggtgataatggtttcaatcacccggctggtgtgaggagagtaggcacttggtttcagtacaactgtatttccggctgcaatcgcatcgatcagcggatcaatggtgagcaggaaaggataattccatgggctcataaccaggacaacaccataaggagatggcttcttatagcttctggaagcgaactgggcaaggggagtcagtactgttttttcttttgcataggaaggtgtatggcggatcatgtagctgagttctgagagcacaagtcccacttcacacatataggattcaaagttactttttccaaggtcacgtttcagtgcttcattgatcagtggttcatatttctgaatacaggtctttaatttttttaaggcatccagccttttttctaccggtaaagtggcacctgtgtaaaaatagctgcgttgtttctgaacgatttctttaatttctgtttctgtcataatacattatttccttatataatatagatatcaggtaactattgagagtctgcaggttcctgtattttgatatttttataaaaaacgctttgcaggatagaagaatattaacagttacttctcagcttctgaggtattttccttggaagtcagagacatcagcatgtaataaaatttctccagttcggaggcatccataagcttcggcacaggatacagaggattggcctctttatctgcataatgggcaagcttggggatatctgtttcctgaatttcttttacgatatttacgattccaaatcgctctttcatctcttcaattgcccggataaaaagctctgttgcttcatggtccggcgtatttttgtctgcaagtcctgctgcaatggcaagtctgtggagctttttgtcaatgcaggagccatattcccgaagtaccagcggcagcagaatggcattggcaagtccatggggaacgttgtactgtccacccagagagtgagcgactgcatgaacatatcctacataggatttggtaaaagcacagcctgcgtagaaggaggcgtggagcatatttcgtcttgcctgaatattatcgccatgctcataggcaatgtctatattttcaaaaatcagttttaccgcttttaatgcatccctgcgtgtatcaatggtggtggaattgccgatatatgcctccactgcgtgagtcagggcatccatacctgtagttgcggtgataaatgggggcaggcttaaggtaaccttgggatccagcactgcatagcggggaatcagcgggaaatcgttgattgcgtatttgtatctggtgtctgcatctgtgataacagcggcgagagtggtctcacttcctgttccggcagtggttggaactgccatgagaaggggaagtttcttatgcaccttcaggattcctttcatctgggccagagactgattgggtttaaccgcacaggcaccgactgccttggcacagtccatgctggaaccgccgccgaaaccgatgatggcatcacagccctctttatggtaaagctccagggcttcgcggacattgacagtagtagggttggcaactgttttatcataaatggtataggggatgccggcctcctttaaagctttttccagtcttctggtaagtccaagcgtcatgataccgccatctgtaatgatcagaacatgggtgcatttgtggcgcatgatgatttcgggaagttctctgacacttcctgcgattttgggttttctgtaaggtaaaaagggaattgcaatgtgaaaagccttttggaaagccctgcaatatatttttctgagagtgttcatggataattcctttcttgacggcagcctgctgtttttcagactgccggacagcagttacttcagaaaaaaatataacaaggtaaaaaagaaaagtcaatatattttgatattcaaaactataaacaggacagggcatactaaagggaactatccaatctttttctgcggttcagacttggtttcatacaaatgaaagagttaatccctggctatgctggggcgaatagtgtagtagtgatgagttaccccaaatttgtggaagccagatattaaaaacagataagaaaaaaggtcataagggatgcgcagaaatatggtttatatccataaaattttacgaaactacgaaaatcagttgacaataaagtaagtttatactaacctaaagttagtgaagtataacactgctatgaaacagcagtgctatatgaaagaaatttgctccacagaaagtggatatgagggaggaatgaaaaaatgtttctgcagatacagggtattaagaagtcttttggtgcaggggacagccgggtggatgtgctgaaggggctggatcttgacattgagagaggggagttttgtgtgcttctgggaccgtccggttccggtaagtccacgcttctgaatattatcggtgggattgacagtgcggatgagggaaatctggtcatagacggggaacgtctggcagatatgtcggagaagaaactgtctttgtacagacgtaagcatctgggatatatttttcagatgtataatctgatcccaaatcttacagtgcgggagaatatagaggtgggagcctatctcagtgataagccgctggatgtagatgaactgctccatacgctgggaatctatgagcaccagagaaagcttcccaaccagctttccggcggtcagcagcagaggactgctatcggccgtgccattgtaaagaatccggacattcttctctgcgatgagcctacaggagcactggattataagacctccaaggaaatcctgaagctgatcgagacggtaaaccagaaatacggcaacaccatcgtcatggtaacgcataacgatgctatcaaagatatggctgaccgggtggtgaagctccgtgacggcatgatccgtaaaaattatttgaatgaacataagattccggcagcagagttggactggtaaggaggcatatggtcaactacccatcacctaaaggtaatgggcttgtaactgcccagtcgtagtaacggcttacgcctccgaccttttatccccaataggtattgctacctaaagtgacgctacatcatagggtggttgacagcgccctttacagacaagatatactcatctgtaactgtatcaggtactaaacttcccatgctatacagcaaacattcttttacgggtaagattttacgcaatacgcgagttttgtattgcaacctcatatcttgtcaatgcacaaaagagtgtctttgatgagcagcacatctaacggttttctctttaaaaactgctacggttattgtagcatattggataataatttacaaggctcctcccaccgcctaaaggcagtgggtttttgcctatgacaaaggaaaggagttatttatgaaaaatcctttacgcaaacgtctgcccagagaactgaagggggaactgggaaaatatctggtggtctttattttgatggtattgaccataggaatggtttccggatttctggtggctgacggaagtatgattgttgcttataatgatggatttgacaaatacaatatagaaaacggaaatttccgtaccaatcagcagatatataaaagccagaaagaagaaatccagaatctgggaataaagctgtatgaaaatttctatattgaagaacttctggataatggaagtaccatgcgctttttcaaaaacaggacagaaatcaatggagtatgtctgatgcagggagaatttcccaaagcaacaggggaaattgcaattgaccgtatgtatgcagacaataatgaactgaaggtgggagacaccttgaagagccagagcggtaagcagacctggaagattacagggcttgtggctctgtctgattacagctgtctttttcagaataataatgattccatgtttgattctgtgaaattcggagtttctgtggtaacaccggaggagtttgataccctggatcaggataagctccagtacaattattcctggatctatgacaaacagcccaaaacagaaaaagaggaaaaggacgtttcagaagaactgatggaaaatataggggaaatcgttaccctggaagcttttgtacccagatatctgaatcaggccatcacctttaccggagatgatatgggaagtgacaaggctatgatgattatattgttatacattgtaattgtcattatggctttcgtattcggaattaccatcagtaatacgattcgcagggaatcaggggtgatcggcacactcagagcttccggctataccaggagagaactgatccggcactatatggcactgcctgtccttgttacactggtgggagccctggtgggaaatattctgggatatacagtatttaaaaatgtatgtgcaggaatgtattatggcagctatagcctgcctacctatgtgaccgtatggagcgcagaagcttttctgcttacaacagtagttccggtgatcattatgctggtggtgaattatggagttctccgacacaaattgcgtctttccccgctgaaattcctgcgcagggatctttctggcagaaagaagaaaaaagcaatttatttaagccctgttataaaaatcttttccagatttcgccttcgtgtgatctttcagaatatgagcaattatctggtactgtttatcgggattatctttgccaacctgctgttgatgtttggattactccttccttcggccttatctcattatcaggtggaaatccagaataatatgctggcaaaatatcagtatatgcttcaggttccggtaagtgcagccagtggaaacaaatttgacagtctgttttctatactggaattctatatgtctgcggaaacaaagaatgaagatgcagaagagttttcagcatattctttaaatactcttcccggaaagtataagagcgaggaggttcttttgtatggaatcgagccggacagcagatatgtaaaggctgatcttgataaaggaatctatatttccagtgcttatgcggacaaatatgggattcatcccggagataccattaccctgaaggaaaagtatgaaaaggaacagtattcttttaaggtaacaggaatttatgattatacggcaggcctgtgtgtatttatgaccagaactcagctgaacgaaacctttgatctgggagaagattattacagcggctatttttctgataccaggattacagatatcaaagacaaatatattgggtcagtggtggacctggatgcactgaccaagatttccagacagctggatgtatctatgggaagtatgatgggaatggtaaatggatttgctattgtgatctatatggtactgatctatcttctttccaagatcattatcgaaaaaaatgcccagtctatctcaatggtaaaaatcctgggctatacaaatggcgagatcagcaggctgtacattctgtctacttcaatggtagtagtgctctgtctgcttgtcagtcttccaatagaaacggcggttatgaaggttctgttcagggagatgatgctgtcaagcatttccggctggattacgctctggatcgacccgatgatctatgtgcagatgtttgcagcaggaatcattacatacggaatcgttgctttgctggaatttcggagagtgaagaaggttcctatggatgaagccttaaaaaatgtcgagtaggacaaaatttgataaaaatttgacattgtctggaatttgtggtacggttacacaggaaactgttagagcgacacgctctagaccaatcagttggaataggagattattatgagaaaaagaacaacttcaagagcaaaggaaactattaaagaagcaacaacaaaggctacagaagcagtcaaagagacagttgagaaaacaactgtaaaggcttcagaagtaattgaagaagcaaaagacgctgcagctgatattgcgaaggctccggttgtagaagaagcaaaagaaactgtaaagaaagcagtaaaagaagtggctaaaaatatcgacatcaaaaaattcgcagaaacaactatcgaattacctggttttgcagttacaatgagctccatcgaggaagcaatcaaaaaagacatcaaagacaaaggcatcgaaggaaaagaaatcagcgtttatgtaaatgttgagcagaaagccgcttactacacagtagacggacagggctctgacgattacagaatcgacctgaatacattataatctgtaagcattttttataaaccgaaaatggatgtctgcagggatccggaaagaaaatctgcagacataaaaacagcaggattgttcatagaatgaacagacctgctgttttgcttatttatgatagaaccacactgcggcggatatggatgatatctcaggaagctttctgctcaaacagatcctcccttgtaatattctgtgcccatttcccctggcggtaatgatggaatacccatggccatttcacaaactcatctgtacagagcaggaagtaaacccacaataccggaagcttcaggacaaaggccgcaaaaaatcccagaggtaccgcatatacccacatatcaatggtatcgcagatcagtccgaacttcgtatcaccgcctgcgcggaataccccggcgatcagggctgtgtttaccgcagaacccataatataataggtattgataagcagcatgtacttcaaataatgcattgccccgtcacttaaggatgcaaatctcaggaccagaggcgtgatggcaaatacgatcacaccgccaatggcaccggctataatggtcatcttcagcattctggaagcatacaccttcgatttctccagatccccttttcccattacgtttccaagaagaatcgttcccgcactggcaattgcaaagcagaacacagaaccgatattgcggacaaccgtaaccagagagttggctgcaacggcatctgttccgagatgtcccaggatcacagagtacatggagaaagcaacactccaggaaatgtcatttccaagagcgggaagtgacagccggacgaagtcgccaaacagcaccttactgcggataaacataaaggtcaggttcaatttaacatctttgctcaggaaagaaacgatcacgcatgctgccagttcaatcagtctggaagcagcagttgcaatggcaacacctgtagcccccagcttcggtgcgccgaaaagcccgaagataaaagtagcattcaggataatattcaatataaaagccagcatattcaatgccatactgatcgttacacgtccgatactgcgcaaaatcgccagataaatctctgtaattccccagcagagatatgtaattcccataatcctcagataagaagaaccgatagagatcagttcctgatcagaagtaaaaatcttcatcataagctgagaagcagtaaatgcgatcagtgctacgattcccgagattatgatggaaaagcggagggcaattccctcgatcgcatgaatagcctgcatattattttttccgaaatactgcgcacacagaagagatgcgcctgtaccaagtccataatataccataaacaggatattggagtaattggcagccagagacaccgcagaaatcgcagactgtcccacataattaagcataattacatctgcggagttaaccgctgcactgagcagattctggataatgatcggaatcgtcagtttaagcatctgccggtaaaaattatccttaccggccgataatgtgtttatcatatttacccccgtaataagtatttgcccgatcaggcagttttataagtctgctttcagcataatccttccggcagaaaaacgctatcggtattttgactgatttctacgttattttgacttttgagcccttaaacaaatcaactttgcttataataccttgcacaaaagaagtcggactgatataattcgtatgtattttgagaggaatacatactgtgactgataaaaatataatgggagaagtttatggcgacattacagcaattagatatgaatattttactgtggatccaggaacatttaagggtggatgtcctgactccgttctggagagcagtcaccttcctcggaaacggaggatggttctggatcgtattatgtgtgcttctgatctgtttcgggaaaacacgcaaaacaggagtgacagcggcactctcgctgctgtcagggtttctgattacaaatctgctgataaaaaatgcagtagcccgtccaagaccttttgatacttatacacagatcattccgctgatcaccagaccgaaagactattcatttccatccggccatacctgcgcttcctttgccgttgcactggtctgtctgcagatgctgcccgggaaatggggaattttgcctgttgttctggccggaatgattgctttttccagactctatctgggcgtacattatccgggggatgttctggcaggatttctggtggcattgctcacaagtacagtggcatgcaggctgatgcggagaacattttcacctcagaaaagctgaccggttcagaagaaaacttccggggggaaatacaaaaaagatatgcaaaaatcagcagaaaaatattcgaatgtaaagtgtaaaggataatcttgtaatgaacaaaaatgaaatctatataaagagcggaaccaattacaaagaaatgacaaaggaactgctggcacagtgcggcctggcgtctgtaatttcagataaaaagatgcagattggtatcaagcctaatcttgtatcaccttccgaggcttcatggggagctaccacacatccggaaattgtggcgggaattattgagtatctgcaggaaaacggatatggaaatattgccattctggaaggctcctgggtgggagataagaccatagaagcatacgaagtgtgcggatatcgtgaactaacggaaaaatatcaggtgcctttttgggatatgcagaaagacaaggggattgaaagagattgcagggggatgaaactgaatgtctgtgaacgtgcggcaaatattgattttctgatcaatgttccggtattgaaaggccattgtcagacaaagatcacatgtgcattgaaaaatatgaaaggattgatccccaatacagagaagcgtcattttcatgcgatgggactgcatgaaccgattgcacatctgaatgcggggctccatcaggattttgtcgtggttgataacatttgcggggatctggatttcgaggatggcggaaatccggtagtgatgaaccgtatctgggcggggacggatccggtactgatcgattcttatgtatgtcagatcatgcattatacaacgaaagatgtaccgtatattgaactggcagagaagcttggggttggaagtactgatctgaaaaattcccacatcgtatactgtgaggaaaatgcccgcaaagaacttccgaaatcaagaaaagtggtagaacttcaggatgcagtagaagaagtagaatcctgcagtgcctgctatggttatctcatcccggctctggaaatgcttaaaaatgacggccttttcgagaaactggacacgaaaatctgcatcggccagggataccgcggaaaaacaggaaaactgggtgtaggtgcatgcacctgtaaatttgaacataacgtaaagggatgtcctccaacagagaatcagatttatgatttcctgaagcagtatattctgggagaaaataaataatatgatatcagggtcctagagcgtgtctgaaaaatgctttccgcaagatgtatgtcacaatttgtgggagattttgcccggatgagggcgtcgtagcgggctacggcaaccgaattcgagcaaaatataccgcaaagtggggcgtgcagattgcgggaatgatttttcagacacactctagtacattgttttcgaaataactataccactcacttgtctgcgaatccgattgcacaggcctaaaagcctcagcgtagcccgctacgcctgcgtttttataccagcacactcgaatccgcatcctacgcgattggtatagttatttacgaaacgatgtactaggttcaaaaagtcgttcgtgcctgcatgataagacttttgaatctggaaccctgtttgattttacaatgccatctttatcatctgtataattttatcctgctcaaatttactgctgtcaaatgccagatgatactgggaaatatctttccatttcttatctgtaaagtactcataataagtacgccgttctttatccactttcttaaccagcttctgtgcacttttttcttcccgtcccgtacgctcgatgacagtctgtacacgatactcaaatggtgcatggataaatacgctcaggcatttattgtcgaggatgtgattggcgcatcggccaacgatcacacaatcttctttctcagcagcatccagaataatctttcgctgaagatcaaagagcacatcattcatgggaacaaagtgaaaatcgctgtccatctgaagttcatggtcaatgggaaaacgccactggctgccacgtttctcatcaaccttggcaagcagatcaaaaggaatattctctttgtgagctgcaatatcgatcagctctttgtcataaaaagcaaatccaagctcttctgccagagctttaccgatcaggcggccattactgccgagcatcctgtttattgtaatcacgcgtttactcataatcaaaccctcctttatgacatctctgttattgaacgatatagattcaggcggatattcgcaaattgtacctgttatctgcaattaacagtgatgagtcttttatttgtgaacattataacattgatacttgaaaaaatccagtaaaatatataaaaaaccaaatatattacgaaaatatttaggtacagtgcacaaaaacgattcacaatgaaacaaatgatgcagttaatccgataatattttgaaaagtgtttttttggatagttttatcaatagacacttttggctgtcatatgctagaattagagtaatatttacagcaagcagcaaagcggatgatattgtccgcctgaccaggattactgccgagacatacaagccaaaattccattgccgcaggcaatctggaatgaattttggctacgttactgagaacggagtgaacagtaacaaaaatttatttatgaaatagaggatatttatagattttttctttaagctatggtattatattaaattggctgtctgacgacagatccgagtcaaaatattacaagagatatgaaaagtatgtaagaaagggatacgatacataatgctgaaaatcaaaagctatgtaaaggtaaacagtctggcggaagcttatgaactgaaccagaagaaaacagcccgtattcttgggggaatggtctggatgaaaatgggcaacagagcaatatccacagcgattgatctttccggtctggggctggatgtgatttcggagaatgatgacgaatttgtcatcggatgtatgactccgcttcatgacctggagacaaatgaagctctgaatacctacacacatggagctatgaaagaaagcctttgccacattgtaggcgtacagttcagaaactgtgccactgtgggaggaagcatttatggaagatatggtttctcagatgttctgaccatgttcctgggaatggatacatgggtagaattatatgatgcaggccgtattccactgactgaatttgtaaatatgaagaaggacaatgacatccttgtaaatatcatcgtgcgaaaagagccacttcttacctgttacttaagtcagagaaacataaaaacagatttcccggtgctgacctgtgctgcttctgtgatcggaaatgaggcaaggactgtgataggtgccagacctgcacgtgccatgatcgtggaagataagaagcagatcctgaagaatttccggaacatgacaaaaaagcagaaggaagaggcgatcgaagcctttgcagaatatgcggcagagaacgttcctactgcaggcaatatgcgaggatcaaaggaatacagaacccttcttgtaaaagtattgacaagaagagcctgggaagcagtaggagggatgaaaaatgaatattaatttctggcttaacggagtgaaccgccacgcagagatctccccggatgcactgctgatcgatttcttaagaaaacagggctgtttcagcgtgaaaagaggctgcgaaactgcgaactgtggtctttgcacagttcttatggacggtcgtccggtgctttcctgcagtacacttgcagcccgcattgagggaaagaaaatcgttacattggaaggaatgcagagagaagcgcaggagtttggaagctttctggcgaatgaaggtgcggaacagtgcggtttctgcaatccgggatttatcatgaatgtatttgcgatgctcaacgagatcaaagatcccacagaggagcagatcaaagaatatcttgcgggaaatctgtgcagatgttccggttttgtttcccagacaaggagtatcctgaagttcctgaaatataagaaagcacaggaggaagcataaagatgaaatatgtaaatcaacctgtacgtaaaacagatgcaatgtcactggtaaccggaaagcctgtctatacagatgatctggcaccaagggactgcctgatcgtgaagatactgagaagtccccacgccaacgcctgggtggaagatattaaaacaggtactgccgagaaggtggccggaattgcatgtatccttacctataaagatgtgcctcagaaacgttttactcttgccggccagactgcaccggagatgagtccggatgacagactgatccttgaccgtcatgtacgttttgtgggagatgcagttgccattgttgcgggtgagacagaagaagcggtagataaagcattgaagagaatccgcgtagattaccgcgtggaggcaccggttctggatatccacaaggcaaaagataatccgatcctggtccatccggaggatgactggaaactgaaaatccctcttggcggagacaacaaaagaaacttatgtgcatccgcagtggaagaacatggaaatgtagatgaagtcctggcaaagtgtaaatatactgtagagcgcacttatcatacaagagcaaaccagcagactatgatggagactttccgcacagcctgctatatggatcatttcggcagactgatcgttctgtcctcaacacagatcccattccatgtgcgaaggatcgttggaagggcactggacattcctgcttccaaagtacgtgtgatcaagccaaggatcggtggcggctttggtgcaaagcagacctctgtcagtgagatctatccggcgatcgtgacctggaaaacaggccgcccgtccaagatgatcttctccagatatgagtccatgatctgctcttcaccgcgccatgagatggagatcacagtacgcgcaggtgcagatgaaaatggtatcatcaaggcaattgatctttatactttgtccaacactggggcatacggagaacacagttctacaacagtaggactcagcggtcataaatcaatcgctctttacagacatacagaagcccacaggtttgcttttgatgttgtctatacaaatgtgcaggctgcaggtgcctatcgtggttatggtgcaacccagggtatttttgcagtggaatctgcagtaaatgagctggcacataagatgggaatggatcctgttaaggtaaaagaaatgaatatgcctgtagagggcggtcctcttcctggatatccggatgttccttatgcacagagctgttccatggaccgctgtatggcgcgcgccaaagagatgatggactgggattccaaatatccatgcagggatatgggaaatggcaaggtccgcggagtcggtgttgccatggctatgcagggttcctctattgcaggagttgacgtaggcggcgcagatattaagctgaatgaagatggttcttatacactggcacttggatgtacggatatgggaaccggctgtgataccgttatggcacagatcgcggctgactgtctgaatacgcctatggataacatagtagtattcagtgtggatacggatatttctccttatgattctggttcctatgcttccgccacaacctataccaccggtgtagcggttatgaaggcctgcgaggagctgaagaaaaaaatctgtaagcttggcgcagagatgatggaagtagatgagggaaaagttgattttgacggatcctgtgtattctatgatgagacacttgagataagcgatggggcagacggaaatgcagcaggtcatatggcagatgcagaagagggctatagtgttgatatggatgccatcagttctgaaaatgcccagaagaaagtttcattggaagatattgcattaaagagcactttctttaataatatcgagcttcaggttgtgaaacagcattcttcaccgatctcgccgccgccgtttatggtaggtatggcagaagtagaggtggatacagagacaggcagtgtggatgttctggattatgtggcggttgttgactgcggtacaccgatcaatccgaatcttgcacgtgtacagacggagggcggtattgcacagggaattggcatggctctctgggaagatgtacaatatacagataaaggtaagatccgcaacaactctttcatgcagtataagatcccaaccagacaggatatcggaaatatccgcgtggatttcgagtgcagttacgaaaagagcggtccttttggtgccaaatccattggtgagcttgtaattgatactccatgtccggcactggctgaggcaatttataatgcaacaggtgtgcgtctgacagagcttccgatgactcctgagaagattgccatggagattttgaaaaaccgcgaatccatccggtcagggacaaaggtggaagaatgagagaattatgccttgcctgtgcaggttttgccctggagtttatagttttttatgcagcaggcattgttctggtccggatattgaaagtaaaaggggattgttccctgactttcatactgggatatctggtttactttgcagtgtttgaactggtgatcgtaccgatgacactgaaatgggtatccctgacagctgcggcttatatatgggcaggaatcatggctctggttatctgcgcagctgtgatctgcacaataaaaaaacaacggagaatacgtgccggacaaacggaaacatgtagtgggatttttggaagcatttctgaaatatggaaaaatcactctgtgatgattatccttgcaggtgccgtagtattgctgcagtgtctgatcgtgatcttttacgaggatacaacagtagatgcggcgtattatgtaggtacagtgagtacttctgtatacacagatactcttggcagatataatccctttaacggagcgatccagaaggcatttcaggccagatatgttttttccgcatatccgatgcataatgcagtgtggtgcagacttctgggaatccatcccattgtgcaggcaaagcaggtaatgtcatgtatgaatgtagtgactgccaatctgatcatttatcagatcggtaagagactgtttgacggaaacaggaagaaagcagatctgatgcttgtctttgtctgtgttttacagctgttttgcggtacgatttattcctccggaacttttttctttaccagaagctacgagggaaaagccatccttgccaacattgccatccctgcagttctcatgtgtgccgtctggtatctgcaggagaaaaacagcaggaatgtctggatcatattgtttgtcacagcggtcagtgcgctgacattttccggttctgctatcatctttccgatcgtgatcgcagcgggaatggctccgtcggcagttatgaataagagattttcagggctggtatattgtgcagtgtgtatgcttccgtcggcattatatgcagctgtattttttgcatgcagaatcggtctgctgacgctggctgcatcataatacagaaaggagaaaaaaatggcaggtgtaacaattcaggaactgggactgcgctttgttgatgcatgtatgaggctgtactggggttcctgctggtatcctcttctgtttgctgtaggactgatctgcacactggtccgggggagaaaaagaaagtccgggatatttgtcggctatacagtatttctgctgctgacagtatataatccgctggttgtaaaatatcttatcgcaaaggtgaagtttgagaatgaatattaccggtttatctggattcttcctgtgatcccggcggttgcctactatggagtcagacttgtgaccgcttttagaaagacctggataaaagttcttatggctgcagctgtgctgacaggttttgtgatcctgggaaatccgctggacggggtagtgaccaattttgcaatggcagagaatatttataaggtgcccaatgatctgcgtgcagtctgcgacgtgatccaccagaaccaggagaatgattttccaagggttgtttttgacggcagtcttaacagcattgtgcgacagtatgatgcggggatcgccactgtaataagcagaaatgcaagtatctacagatcaggcagtacagtggtgggaaactatgatgagaacagcagtttctataaaagacagaaagcattgctggatgtgatcgattatcatatctatgaagataaagaagggtttcaggctgcgttgaagaaatcaaagacagatttcgtagtaacacagatcgggctggttgaccatgattttctgacagagtgtggttgtgaactgatcgcacagacggaatcctgctacatttacagatttgattatagcaatcctcgtaaataatgcatattgatccggctcatcagagcgtgaaattctgccaagctgtttcaaatgcattaattaagaggcgtgctatgatcgaaatatcatatatcttacaagagaaggagaaaagaaatgaaaagtaacataaaaagactttcgctctgcctttcagcactgatgctgctgatactggcaagtccgctgactgtacttgcagcagaggaagaggtggctgcatctgcgaaattttacggcacattctggtcgttggttccgccacttgttgccattgcactggcactgatcaccaaagaagtatacagttcactgtttgtaggaatactggttggtgcactgttttactctaattttaatttcgaaggaacaatccttcatatttttgaaggcggaatgatcagcgttctgacagattcttataatatgggtatcctgatcttccttgttattctgggaaccatggtatgcctgatgaacagggcaggcggttccgcagcattcggacgctgggccggtaagaggattaaaagcagagttggtgcggaactctcaaccatcattcttggtgtactgatctttattgacgattattttaactgtctgacagtaggaagcgttatgcgtcctgtgacagataagcacaatgtgtcccgcgcaaagctggcgtacctgatcgatgccacagcagcaccggtatgtatcattgcaccgatttcttcatgggctgcggcagtcagcggatttgtagaaggagaggatggaattaccctgtttgtacatgcaattccctataacttctacgcactgcttacgatcttcatgatggtggcaatggttcttatgaaagtagaattcggaacaatgggtgttcatgagacaaatgctttaaaaggcgatatctacacaacacctgcacgtccttatgcaaacgcagctgaagatgagaaaagtaatccgcgtggcaaggtgatcgatcttctgatcccgattgtaagccttgtaatatgctgcgtaatcggtatgatctatacaggtggtttctttagcggaactgattttgtaactgcattttcacagagtgatgcatctgtgggactggtgcttggaagcttcttcggactggttatcacgattgttttatatctgatacgtcgtgttatgaatttcagagactgtatggcgtgtattccggacggattcaaggcaatggtacctgcgatcctgatccttacttttgcctggacattgaaggccatgacagacagccttggtgcatctgtatttgtatctgcaattgttaaaagctctgcaggcgggctgatgaatttccttcctgcaattatctttgtgatcggggctgttatcgcatttgcgacaggtacttcatggggaacctttggtatcctgatcccgattgttgttaatgtattctcaggaacaaatcatgaactgatgatcatctctatttctgcatgtatggcaggtgctgtatgtggagatcactgttcaccgatttccgatacaaccatcatggcatcagcaggtgcacagtgtgaacatgtaaatcatgtcagcacacagcttccctatgcaatggttgcagcagcagtatctttcctgacttatattatcgcaggatttgtacagacagcatggatcgcacttccggcaggaatcattcttatggcgatcaccctggtgatcatccgattaaaattcgacgatctgaaaatgtaaataaaaccgggcagtcagcacaatgcatgactgcccataatttttgacttgtaacaaaataatgcatcttttgtaacaaaataaaaaactttacttttttcggtaattatgataatatagaccttgtattaaataaattatataaatcctttgaaaatcagattttcaagatacgcgcctgtagctcagtggatagagcagtggtttccggtaccatgtgcgggggttcgattcccttcaggcgtgctgcctgggacgtatgtacagttccggtgcgttgtatcacaggagttatcagaatcgggaactgtcagaaatcgtatgcggcagtgaacggagcaaacggtaactcataaggaggacaagaacttggatgattttagagaatggttatcagataatctccggtattttatgttgggtggagctattctgataattgtggttgtcctgttttgcggcattcgagcctgttccggaagtaataaggggaattccggagatgaacagaaaaccacatccgaagaccagggaaatgttccttcttctccgataagtgaaggggagtctgacgagaagaaagaagacgccaatcccatggaaacagcagatgcagacgttactgcattgatcacgagctattatcaggctctgggggaaaaagatattgcaacgctgaagactctggaagatgattttacaccgtctgatgagtcaaaagtcacaaatttgaaagattatatcgaagggtatgaagtaggcgatgtgtacacgaagaaaggtatgacagatgattcttacgtggtttacgcctgtttctcgtatatctgtcagggcgttgagaccaaggcccctgcactgactcagttctatgtatataagaacagcgaaggaaactgggtaatcaataacggagctttacaggattctgagatttccgcatatatggaaaaacagttatcagacagtgatgtttcagctcttataaagaaggtgcagaatgaactggatcaggcacagcaatctgatccgtctcttgaagaattcctgaatggtcttggggaggaagcaggtgtgtcaacagaggcagaagatggcacgatgcttactgcttcggaggaatgtaatgtacgcgcagaagccagcacagatgctgatatccttggcgtgatctcagcaggtgatcaggttcagaagacaggtactgatggtgaatgggttcagatcgactacgacggtcagaccggatacatcagaggagatttacttgaataaaattgaatatggaacgtaaaaaatacaggcggttatccttgtggtaactgcctgtattttttacgttccgtttttctgacattgttcttgtcagcttctgctggagattttgctgttcttattacttttcgcagcttccgcaagggacttacttgattcgattaaattcaccgtatgtaactcctgccgataattctgtctgatgcagggaagccagttcgtgcactgttacaagctgatagccttcttcgataagctgcgggatcaggatctcggctgcatctacagaggtgctgaaaatgtcatgcatcagaataatggaaccatcttttacgttattcatgacttcctcaaccgtagattccacatcctgcgttttccagtccagggtgtcaatggaccatagaatcatcggggttcccacagttgattttaccgtatcattaacagatccatatggcgggcggaccaccgaagctccctcacctgtaagatttacaagctgttcatccactcttgcaatttctgaactgatctcatccgaagaaagagtcgccagatccttatggccataagtgtggtttccaagttcacagcccagtttcttcatgcgttttacttcgtccggaaaactggcaatctcagtacccaccataaagaaagttgcctttgcattattttcttccagacagtccagaagacggtctgtaaaagagctgggaccatcatcaaaagtaagggcaaccgacttctttgccgtagatgtaccggacttgtcagaggtagctgacttatctgaagatttcttcttcgaggattttttctttggcgtataatctttcagagaaccatctgtatccagttcataagttttcttatctattatcacagtccctgtctgcagaataccatccatatcaaaataataccgcttctttccgatatctgtccagcctgtctgcataataccggtctcatccatatagtactgtttcccgtctgtatctgtgaaccatcctgtgtatggcttatcatctaccagaaccatccagttacttccgctggaagcccagctgccctctgatgcctcaggcgagatatcagtgcttaatgcaggaccgcccggagaagtttcagatgaatctgaagaagtacgtccaaacagtttcccggaagaagaatccgtaaaattatcattgctatcagtcaatgtttcctcagaagtaaactccgcagaatcctgatcttctgacacgaaagctccggtatcgctgatggcatctgcctgtgaagtcacagcggaagaacgggtgaaaattcctccaagtatcagacacagaataacagaaagtgcgatcagccaccggtttgtacgtggtaaattatctgacatgaaagcctcctttttgataaaatcagtgacaaaaaagatatcctgtcattcgatatcatacaataaaatctgacaaaatacaaggcgattccccattcctgcccttttgaaaaaaattccagaaaaattccatcaaaatttcaccgttgataagatgtacaaaaaattatataatagaacaatggacgaaaaaatcagaataaacaaatatttaagcgaggcaggcatatgctccagacgggaagccgaccggatgatcgaagagggaaggattacggtaaacggaaaaaaagcagaaagcggtcagaaagtcagcctggaagatgagatctgtgcagacaatatacctgtccataaaaatgaaaaaaaagtactgcttctttttaacaaacccagaggaatcgtgtgcagcacaaagcagcagtttgatgagacgacggtaacagattatctggattatcctctgcgtgtttatcctgtgggcagactggataaagaatcacagggccttctccttctgacaaatgaaggagatctggtcaataagatcatgcgcgccggaaactatcatgagaaagaatattttgtgacagtgaataagccggtggacagggaatttgtccgaaggatgagcaagggagtccctgttcttgatacagtgaccagaccatgcagagtggtgcagacaggagaatgcagctttcggatcattctgacacagggactgaaccggcagatccgcagaatgtgccggtatctgggatatgaggtacagaagctgaaaaggatcaggatcatgaatctgactctggacgggattagagaaggcgaatacagagagatcacagcacaggagtgggaagaactgaaccatttactggaatcttccacaagtgaaacagtgatcagaacaggagaacagaatggaaacagcagcgatcatgcgaatgaaagagctggtgcaaaagctggacagggcagcaaaggcgtattaccagcaggatacagagatcataagcaacagagagtacgatcagatgtacgacgagcttcaggctctggagaaagagacaggcactgttctggcaaacagcccaaccataagcgtagggtacgaggcagttgaccagcttccaaaagaagaacacgaatcccccatgctgtctctggacaagactaaggacagagaagttctaagggaatttatcggggaacacaaaacacttctgtcatggaagctggacggactgacgatcgttcttacctacgagaatggagaacttgccaaagcagttacacgtggaaacggtgtgacaggagaggttgtcaccaataatgccagagtatttaagaacgttcctcttaaaatcccgtatcagggaagactggtgttgcgtggggaagcgatcattacctattcggactttgaacggatcaatgaatccatagaagacgttgatgcgaaatacaagaatccgagaaacttatgcagcggttctgtccgccagttaaacaatgagatcacagcccgcaggaatgtgcgtttctacgcatttacgctggtaagcgccgacggggttgatttccataattcaagagcccggcagtttgaatggctgaaagaacagggatttgatgtagtggaatacaggacagtcacagcttcaacgctggatgaagccatggaatatttttcaactgcgatcactgagaatgattttccgtcggacggactggttgctctttatgatgatattgcatacggagattcccttggaagaacagcgaaatttcccagaaatgcttttgcattcaaatgggcagatgagatcagagaaacccatcttctggagatcgaatggagcccatcaagaacagggctgatcaatccggtggctgtttttgaaccggtcgagctggagggaaccactgtgagccgtgccagcgtacacaatgtgagcattctaaaagaattgcagcttggtatcggggatacgatcactgtatataaagcaaatatgatcattccgcagattgcagaaaacctcacacgcagcagtaaactggaaattccggatacttgccctgcatgtggccatggaacgcagatacagaaggtaaatgatgtggaggcactttactgtacaaatcctgactgtgccgcaaagaagatcaaatcctttgcactttttgcaagcagggatgccatgaacattgacggactgtcagaagcaacactggagaaattcattgcaagaggctttattcatgatttcggagatatttttgagattggaaagcatcgtgatgagatcgtggagatggacggattcggggagaaatcctttgagaatctgatgaccagccttgataaagctaaggagactactcttgcgaaggtgatctacagccttggaatcgccaatatcggccttgccaatgcaaaagtgatctgcaggcattttgatgatgatctggagaagatccgtcatgcagataaagaggagatcagctctattgataccatcggaccggtaattgccggaagtctgactgattatttttcaaacgaggataataacagaaaactggatcatctgatgagccatctgactgttaagaaagaagaaaagacaggtgagcagattttccggaacatgaatttcgttatcacaggaagtgtggagcactttgcaaacagagcacaggcaaaggaatttattgagtctctgggaggcaaggtgaccggatcagtaacatcgaagacgaactacttgatcaataatgacacaacttccaattcttcaaagaataaaaaagccaaagaactgggaattccaatcctttcggaagaagatttcctgaagatggcacaacaataaaataataagaacaggagataagataatgccaattaaaatacagagcgatctgcccgtaaaagagattctggaaaaagaaaatattttcgtgatggatgagtcacgtgcatcccatcaggatatccgccccattcagatccttattctgaacctgatgcctctgaaagaggagacagagcttcagcttctgcgttccctttccaacacaccgctgcaggtagatgtcacttttatggcagtacagagccatgaagcgaagaatacatctgtgagtcatctgaataaattttatcagacatttccggaactgaaaaataacaaatacgatggaatgatcatcacaggggctcctgtagagcagatggaattcgaagaggtagactactggaaggaactggtagagatcatggactggacaaacacccatgttacctccaccatttatctgtgctgggctgcacaggcaggactctaccaccactatggactgaaaaaacgcaaacttgataagaagatgttcggtcttttctggcataaagtgatgaaccgtaagattccgctggtacgcggattcgacgatatgttccttgcacctcattccagacatacggaagttcccatcgaggatatccataactgtaaagaactgacagtgcttgctgaatccgatgaagcagggcttttccttgcaatggcagacggcggccgcaagatctttgtaatgggacatccggaatatgatcgtgtgactcttgacggtgagtacaaacgtgatgtcagcaaaaacctgcccatcgaaatcccggagaattattacaaagacaacaacccggaaaacagaccgctccttatgtggagagcacatgcgaacaacctgtatacaaactggctgaattactatgtctaccagtcaactccgttcgacctgtatggaacaccggatttcagcgagatctaaagggtttgcgagaagttcaatttcactatcttaccgtatttttacgtaatttcatgcgaaaatggagtaaaaatggggtatggattcagtaaaaatggggtatgacatatatctaacaatgtataatagggaatttcacacagtaaatgcctgatattgccaattgaatattttaaacatctgaataagtccatgtacttgtataactacaggtatgtgggcttattttagtgcttaaaaataataggtaaagtttgcagatgagtatgagaaacggtttatcagattagaaataagcaacagaaaaaacatacccgaagaaatggtgatttaatagaacaaaaacaaggaggaaatgacaatgaacaaaacaatatatgaagcagagtttaccaaaatggtacatgataaaatgagagaagctaatagattcaaagaatatgagagaatacccaaaaataggataggtggggattactggaatacttactggacaatccgttatatgcttcgcactatgacagatattttagaaaatggagataaactggtattattaggatacttcactgtaaagcctaaattttataaggaaagaacagcatgtcctggaatggaaagaacaggaaaaaatgtgtatgagattccagaaagatataaggcaaagtttaaatctggtactgtgttaaatcgtgcttgcgaagcgtatggagattatcacaaagaagaagcaaataataaagatgatgaatacgaagaaggagaagaagagtaatgagatgtaaagattgtgaatatgtaaaatgctatgctgtcaataagaagatgtattattgtgacaatagaaatagaacaaatctgatgggtaaactgggtgatgatgttttacctgagacaagtcctgagtggtgtccaatggctgataggacaattgatgaaaataatatggctgagaaaggattagagaagtaatggaattaaacaatacagaaatgaagatgcagtatattcttgatgaaaataaaaatctggcagagataccattaacagacatgttgcctgtagaatatccaattaaatataaattaatcagtgcatttgaagtgtttgtaagagtgtcaggtacagaaaactattggatttctaattacggaagaggtataaataattatagaaattcagataagaataaattctatgagcataaacaagggcaatgccattatacagtttatgcaatatcacgaacaccagaaaaaattagaggaaaactgacaggtgaaattatagttgaaacaactaaaagagaaacctgcccagaagaactggtggcaaaaagttttctgaaacaatataaaggtagatttaaagtctggcataagaatggtgattttgcggataactggtataagaatttgatatatgttactggtgaagattttagaaaactgaaagcaggtaagattacatggcaggaattaggctatgagcagaaatatattgagtatgtcaacaatgccaagaatcaaccaatgactgcgtatggttctatttctagtcgttgtaaaggtgaaaataacagtgagagtgcgcacaagtgttatgatgatgttgaaatgtgtcaagaatggaaagatgatccgcagttatttgtcaagagatacttggagttatattatgaagtaccaggcgaatcaatggctgtagacaaggatttatttggtaatggaagcaaggtgtattctcctgagacaatctgtattctgccacaaggcttaaatacattacttgccaacagtaaaaagcattataaagatggggaaacaccagacaatgtgcttcctcttggagtaagatataatggtaaagtcaataaatattacggacagattacttattttggtacagaagatgaattgatttaccatatagagatacaatagcagaagcatttgcagattataagaaattcaaagaatgcgacattgcaatcatggtgtcaaaatacagagataagataccagaatacatatatgagaaactacgtacggtgagagtagagccgtattgatgtgtatatcctagagaatacgggcataatattgactaaataattgattcaagactgggtttatgatacaatataatcaagaaataaaggtatatttgtatgaacccagttgttgacataacatgactggggtgttatattcttatgaataataatgcgaattttgaagaacagaaggaggttgattgtatggcattagcacagaaacgaaatccagggtgtattattacctgtggcaaggaaaaaacattctttaaaaaagtaaatgaaaatcgaccgactgaggcattttggaatgaatgcaaacagttacgcaaaaatttgaatacagaatcaattaatgcgttaaatgcgttgatggacaaggaagattaatgggtaatcaagaattaagttttgttgaattgaatcaatcgaaagtcacagatgatgtgatacagcagtttgattgtggaaatgaggatatgacagaatatctacacaaatatgcaaaaaatgattcaatagagggtaagggtgttacatatgttttagtagcagaagacagaaaacatatttatgcttatgcaactattaaggcatatagcttatactattatgacgaggcagagaaatatcatacaaaggtaatgaatgatgatggaaagattttattatctattccagcagttgagataaagatgtttgcaatcagtagaaaactaaaaggtcaggtagcatatttgcttgatccagtaaaaaagcaacattattcaagtatcttctttaaatggtttcttgagtatttatattacatgtcaatgaatactattggatttcagatggtatttcttagagcaaataatgagggagaaaggctttatagaaataatagttttatcgaatgtgatgaatatttaagtacatatgatgctaaagcagatggatgtacttctttagcaattaccttgtcagaaattgaggaagttattttttgataggcatatcagggaaaacaaaatccttgatgtgcctatttttttacgttttatatgtctgctgccgagcggtactctttaatgtaaaaccaccgcccctataaacacgtatattaaattttaaggacgaataatatacacataagaaatatcttcatataatataatatataaaagtctgttataaagcgaaatacaaggcttgagaagcattctgagagcatgatttattatcatagaggttgatcttcatcagaaggaacatagacacaaatatcctgtatctgacagtgcagaatacggcacaagtcattaactgtcttcatagaaatattttgattatgtttaagacgatgcaaagtgctatgagacatatgatgcttgcttgtcaaagtataccagttttcatttgttttctttaatgtttcccagaatggactgtaatctatcatggctgttccttcaaagatatttgatattattaccataaaatagattcttatacttgaatatcttcgttataacgaatataataagggtattacagcaatgtgatagtgaatacgaaatgtcgaacaaatttgacaaaaagaattgtatattacatatagcagtagtataatcaaattgtgaattttatgtgaaatgtttattcaattgaatacggcatagccagagaaatctggtgacgcaaaactacagggtctaagcgaatgtatgacagccagttgcaactatgataattaaggcattgctttttttcttatggagaagtgatgtcttttttaaataattttacggaggaagaagcgtatgatgaaaaagttttttaagaaaatctctatttatacgatgacagcaatgcttgctttttcaacagtaccaggaacagtacaggcacattctggaagaacagattcaagtggaggacatcatgataataaaaatgtgagtggtttaggttcttatcattatcattgcggtggacatcctgcacatttacatgatggtggtgtatgtccttatagtagttctgctgctacgtcagatacatcaactacttctgaggtgagtacaacgacatctggtggagcaggttggggaacttttggcggtggtttagcatcttctaacacttcacagacgacaactgcaacaccatcagcatctaatgcaatacaattaaatgcaggaagtagtattacaatttccaaagacattatcaagattgtacaggatgtactcaatcaaaaaggatatgattgtggatctgttgatggtattgcaggaaataagactaaagaagctattaagaaatttatagacgagaatcaatcagacagtacagataatgcaattgtgaatatggttgctaaaggactggggattaaataaagcaattacaagataaaaggaagtattaacagacatgaataccaaaaaatttttaccgttactcattaaatcgactcttatattaacatcaataggaatgttgactgcctgtggagaatcatcggataatacttatgattcttctgtaacatcttcaaatagttataattcatcagattacagtagtgattcgtattccagtgattatggttcatcggattatgatgacgattcaaatagttacagttcttcttatgattcaaatgattacagttcatcagattatgataatgattattcagaaggacattcttatgataaaagtgatccgttttactctgccaacgatgttgatggtaatggtaagttgacagacgaagaatggcaaaatgcaatggatgacgcaataacctattactattataaaatgcaagagggaaattgatttagataatattgacatggagtttccaaggcatgaaaagaaaatttacaatagggattttaattggtataacagatactatctggatgtggatcgtcaaatgaccaaataaatatatctaaatggatgtttaaagacgatctgaatatttatagttgtgaaaaaattcttggtaaagcaaaagtagaagaattaaataattgcacacaatatttttgggacgactataaaatttgcaataaatatgaaggaacgctatcgctattatattctaataaacaggatgattggtcttcaaatcctgatagaaattcatattctttccagtggactgttcaatgtgatgacgaagaatataaacatatttttaaagatttagaaaattataaccacttacaaaaatatgtcacgagtgcatcagatggaacaaatggtgaatgttataattttattactgattttaaagatgaaaattacgatgaaaaatggttttttggtgataatggtactgcatattttgttatctattcaatatacaaagatggagtccttgagctacagtggggacttgggcgtgttccaataaaagagtaggagtttatcataatggttcaagttatagtctgtttactcatactgatgcaaaactgggaacttgcaaaagatatgaagccattaaatagaattaatccgcttatctaaagggggaaatcatatgaacgaatattttccgacagtagtacaggtgataccattggataactttcatgtgcaggtattctttgatgacggtaagattgtagactatgatgctacagaagatttgaaagcagaaatatttaagccattaagagatattgatgcatttaaagaagcttgtaccgttatgaatggtactcttgcatgggatctttctggcaacagagatgaatccagttgtattgatattgatccgtttactgtatatgagttagaatccattaataatctgattgcttgaataatgtgatcacaatttaatatgagcagcatgaaagccctcgggagttaatcctggggggcttttggtatagccaaatccgttgaagtatgttattatatgcatcagttctcagaatcgggaatattcagttgagataagaaaggacacaacaatcatatgaacataggaaacaatataggaaatatcatgaagatcacaggcgcatggaacacctttaagagcaatcatcccaagttcccggcattctgtcaggcagtttcacgcaaagggcttaaagaaggaagcattattgaaattgcgatcaccactcctgagggagagaagatagagacaaacctgaaagtaaaggacagtgacctggaattactgaaacagctgtctgacctgaaaatgtgaaaaagtttacaaaaattttatttgaataacaggtataaatctgctatagtattctatgttggttaagttgattattattcgttcccatatataagaatgataggttctcaaaagaaagaagaggaagaaaattgcgtaaaaaatcacatattttattagcaagataccttgcggatcagatgcagaccacagcaagcctgcagtctcacagaaaggctttctgtctgggcagcattctgccggatatcaaaccgtcctttatcaccaggagacacgagttctacggaacatttgaagatgtcaagaaccggatgaaagaactggcagatatcagaccggatgagagtaaccagagagtttactggcggcggttcggcgaagtgatccactatatggcggattattttacctttcctcataacaaaacatatacaggaagcttcagccagcataatcattatgagaaagtacttaagaacagactgaaagaatgtatacagcagggagaagcacatgcatatctggaaccggccatccgcttcgcagatttcgccaccctgatcgattatatcgaagctactcatgagaaatacctcaacaagctccgcagcgtggaagaggatatccgctttatcctgaatatgtgttttcaggtagtgcagggactgatacagatctgcattggtaataagaactttgcaggagccattcaggcagcctgacagagatacgctaagaatacaggaaggctgtgtggaaatcatatccgcacagccttcctgcattctgaaatatatctttctcactgcttgagtcggttaaaatgtgacaaaaaaatgaattttggtcaaatctggaatttacctgccctgagctgttgatttcaaaaaatgattatgctagaataaaacaggttaatatttcgggataattcacttatgaaataacataataatgtgaaaagtaatttagacagtatgcccttataaacagggggtaaggacatgctcacagtaagaagggagcaatttagatatatgaaaaacaagtatcttaccagattcttatgtctgacattgatgtcaggaatggtattatccggtcctgcgtccgtacttgcagcagaggatactgctgcgtatacagcagacggttctgatttcagcgattccggtgattttgattcaggatcagagaatccggcgccggcagatccgactcctgcagagccaacacctgcgccggtagacccgacacctgcaccggtagatccgacaccaacagatccgacaccaacacctgcagagccaacacctgcaccggcagatccgactccgacaccaacagatccgactccgacacctgcgaatcctacaccaacaccgtcttcgcagattacgaaggcagcccaggatgtgatcgacagaatcaaagagttgaacgcacagaccatcacgctggagaagaaagccactgttcagagcatccgcactgcatataatgccctgtctgatacagagaaggcacaggtttctaattataatctgctggttcaggcagaagcgactattgctcagttggaagcgcagaagaacaatgcggatacgaataatccatttacgagtaataccagtgctgcacagaccggaactccggtatattatgcgtccaatatccacgcaggtaaggatttctatctggacagcctgaagaataactacaatctgaccttctcagatgatttcgcttctgttatggatgagatcgagaaggaatataaagagaagaacaaagtagcagatgccagcgatgtaaacggcagcaagaccaccacatctgcagacagtcttctggtaagaaactggcaggatatccttgcagtctatgtatatcagcagagccaggacggaaaaacagaatttaccctggattcttcctgcaagaaagaccttgcgaaaatctttgcagagatgaacccgatcgtaagggacaagcaggatatcactcacgttacatacgctaatcgtaaaatcaactactatattaagaaaaataaaatcgcaaaaaaggatcgtacgatccttaagaaatatgtggagacagactgcaaactcctctgcgcggtagtaacagctgccaacggttttgtccgcgagagcgtaggagatgatgtttccgaggaaagagtaaatgttatctccgcagcctattcactggttggtaaagtcggttacttctggggtggcaaatccacagtgatcggtgaagatccaggctggggaactagcgagaaggtatcagccgagggaagcaagagcactggaaccatccgcgcatacggactggactgcagtggttttgtcacctgggcagtgatcaacggatatcaggataaagcaatgcaggaagctgtaggtgacggaacttccgatcagtgggagaaagcaaacgtggtaactgaggcagatgcacagcccggagatctggtgttccagaaaggaccggaagcaggaagcgataatcatgtaggtattctctgcggtaaaacagacgcaggtgactggatcgcagtacactgctcctccggcaagaatggagtaacagtaggcgaagcatacagtgcaagcttccgttacatccgccagccatccttctacccgacacaggaacaggttcaggaaatgcagagcagcagtacggtaagcacaacaacaagtgatgcagcagcttccacaggaacagatatcttttctgcaaatgtgacagtaagcaatactctgcagaatgcgatgaagtcaaatacttccgactcaacaggattcacaacatcagaatccactgagaagacttccatccttccagataagattgatctgtcaaaagagaaagtcgctgtatttaaggcaaaataaaatggataaaagaagggagaaagtcatacaaaaaagtctggctttcccttcttttttcgtgtgtaaacttttttatctgttaacttaaacgatcaagtaaaaactgacgaatttgcttattggtctgcggaatatgcttcaaaagcgaaaaaaatattcgaaaatatggaaacaaaaattgacaaagtgtacgaaatatgcttgaatgaaaaagtaaattctacattctaacacaccttgattttatgcgggattaaattctattttcggagatacacaacttaatttttttagtatataatgcttttatacggaataaacagcatagttttttgcatgataaaaggacatctggaaatagtgtgcaggactaaattccacatgtctgttggaaagactaaattctatgcaatgaaacttgcctgtgcctgtattgttattattattttattaatgctggtatcaatgtgacttcatcggctggtatctctgccaatcctaatgctttatgaagtctgttatccagcaggagacgggatacttcatatggactgtgtccattgaggctgtcccgtttttcgctgttgatatgatttaataacagcagcgttgtcttgtctgtcattttttcaaagcttgttccttttggaaggacataccttatatattcatgattcttttcaatagcacctttttgatcagaacggttgggatcacaataataaatacgtgtgcgtacttccccatttttgctatattccagactctgccggtcctgaaattcatgtccgttgtccgtaagtatcacttcgaaaagtttctggaacagttcaattccaagtaattctgttaaatgatcaaaaatcctggttacttctttctgggtctgttcttctaaaagaaacataagcataaggctacagtttcgaaagaacatagtcagaaagcagggactggtaccttttgctccttcaacggtatccatctcgactacataaacagatttgttcgctgcgatatattccagaaattctttatagctcctatcttttcggaaacttctgtctttaaggctggcagtagtttttcttttccgctgcttgtataccactttacggcgcagatctatgtttctggcttgaaaaacgccacggtttatgtaagaatatatggttcttctggaacaggcgatctcatcagcatgagatgcgtagatgtgggcaatagattgtccttttttgagaagcggtgacaacaggatgtccagtttctgtatactttccggtgtctgattgattccttctctgcttgtggttctaagggcttcataggtgtcctgggcgtattttgaagaataaatctttttgtccatcatgcaattcgttttcttgctgcatccattgcacacataaggcggtttatttaatttctcacattctcttggtttataaaatttacagacatcgctgcatctgaattttctgcagaggacacatttgtgccggcattcattatcaccgcacatatgcatgacattacatatatttgtccggggctttgaacaatcataattatttgcacagggaataggggcaaatgcatctgtacttctttccctgataatagaatgacgtctgacttctttggatatggtacttggatccttgtttaattctattgcaatacttctaaatgaatcaccgttatttaaatgctgttcgattataatacgtgcagataagtcaagatgtttttggttaccctttggtcttcctgtattcattttatcctccttctgcacaggcaggggatcatctgcagtagtattttataaaaagaagaaggaaaaatccatgcagaagtaaattctacaggtatagaatttactcttgcaaggtagaatttaaaaatacatttaaccgtgtacgaaatatgttaactttaaaccaataatataatgtcagataaaaaaaggagaaattccttcttttttgttgctgatattacagtaaaatctgaagatgaaacaccaacagatgatttgttctgtaaacagtgaacacactgttgtgttcggaaaagagatacacagatggcattaagacgtgagagaatgaggcttggtgacatgctcatcaggcagaatgtactgactgaagatgaattaaagaaagccctggaattgcagaagggaagcggcaagaagatcggtgaagttttggtagataatggctttatcactgaggatatgatcgttcgtgccctccagatgcagctggggcttaaagtcgttcagctgacaggcgtgacgatcccgaaagaagtccgaaacctggtcagtgtggacattcttaagaaatatacctgcattccttttgaactggatccctacaacgccaatatccttcatctggcaatggcagatccgatggatatggctgcaatcgatgacatctctatcgtgacaaacctgcagatagagccttacattgctacaaccagagatattcttgcggcaatcgacagatgctacggcgcatcagagacactggatgcagccagacgatttactcaggagagagcacagcttcgtggaggagcagcagacgacgatacagatacggatgtaagtgatgcacctattgtgcagctggtgcgttcccttattgaacaggcaatccgccagagggccagtgatatccatatcgaagctctggagaacaaagtccgtatccgttacaggatcgacggtgcactctatgagcgtatggtatatgacaacagccttctccctgcaatctccacccgcatcaaaatccttgggggtatggatatctcagagaaaaggaaacctcaggacggacgtatgtccattatggtagacagacaggactatgatatccgaatttcctctctgcctactgtacacggagagaagatcgtaatgcgactctcttcaaaactgaaccttacacgtaacaagaaagatctgggacttccacccgatgagatggaacgtttcaaccatatgctggctagtcctttcgggatcattcttgtaacaggaccgacaggaagcggtaaatccactaccctgtatacagcattaagtgaattaaataaagaagcagtcaatatcgtaacagtagaggatcctgtggaggcagatattgagggcatcaatcaggtacaggtcaacaacaaagtagacctgaattttgcgtcagcccttcgttccattctccgtcaggatccggatatcattatgatcggtgagatccgagacagggagactgctgctattgcagtacaggcttccataacaggacatctggttgtatctacattacataccaacaacgcagtaggtactctgaaccgtatggcggacatgggagtggagagatatctgatcgcagattctgttgtaggagttatcgcacagcgccttgtgcgtaagctgtgcagccactgtaaaaaaatgcgtcctgccacctctgaggagaagagagtgctgaggatgaacacacaggaggacgtaaatgtctatgaaccctgtggctgtgatttctgcagccatacaggatattacgggcgtatcggtgtgttcgagatcatggaggtcaatgacgagatccgcgacctgatcgcagagaatggaacaacagaggaactggaacgcgcagccagaaacagcggaatgcgcacactgagagagaatggtatcaactatgtgctgaacggcaccacttctgtggaagagatgcttaaggcatcttatgaatgattgagacttatagattattaattttacgactattaatatagaaggaattcctgcggaaccggagttctccggagattctcagggagttacgaggcagattaggaaatatgtataatttagacgaaatactgatacagtcagtgaaggtaagggcttccgatatccacctgacaaccggcaggccgccaagctaccggatcgatggtgtactggctcccatagagggagaacgccttactccgcagatgctggaagatattctcatgcccctgatggatgtccgtcacagagaagaacttcagaataacggacagacagactttgcatatgccatctcaggtgtgggacgtttccgcgtaaatgtatttaaacagagaggaacacttgcttccgttatgcgaagccttcctttcaacatcccggaacctgaggatcttggtattcctgcagaggtagtggagatgaccacgcggaaaagaggtctcattttggtaacagggccgacaggaagcgggaaatcaaccacattggcttcattgatccatgtgatcaacaggaattatccttaccatattattacattggaggatccgatcgaatatctgcacagacatgataaatctgtggtaaaccagagggagattggcagtgattcaacgaattatgcacaggcactgagggctgcactccgagaagacccggatgtgatcctggtaggagagatgcgagacctggaaaccattttcactgccatcacagcggcggaaaccggtcatctggtattttccacccttcatactatcggtgcggacaagactatcgacagaatcatcgatgtattcccgccaaatcagcagcagcagataaggatccagcttgcctctgtattagagtgcgttgtatcccagcagcttctcaagaaagcagacggaagcggccgtgtagctgcacttgaaatactttttgcaaataatgcagtgcgaaacctgatcagagagagcaagacctatcagatctcatctgtgatgcagaccagcaaacgtgcaggaatgcagacgatggatgatgcactgtatgacttatatatgagaaaactgatcgatgcggacaatgcagtgacatatgcccaggatccggtcagcatgaacaaaaaagtcagctttgacttctgacagaaacccgatctggcagacaccctgagcctgactgacagaaagaagtgataagatgccgggttttacctacgtggcagtagataaaagaggaaaagagaaaagaggaagtattgaggctgacaacaaagagaaagttatagatatcctgaaaaacgacgggctgattccagtctctgtaaaagaacagggcgccctgaacaaagagatagatttctccataggaaagaaagtaaagccaagagatctcagtgtattctgccgtcagttcgtcagcatcactcaggcaggtgtcccgatgaaggaagccctgcagatgctttcagaacagacagagaacaaatggctgaagcgtgccatctcagaggtacttctcagtgtggagaaaggaaatacactggcagactccatgagaggccagtcagatattttcccgccaatgcttatcaatatggtagaggcaggtgagaactccggaagccttgagatggctttcacacgaatggcagtacagtttgagaaggaagccaagctgaaggcaactatcagaaaggcaaccatctatccgatcattctgattattgcagcgattggagttgtggctgttatgcttctgttcgttattccgatctttattgatatgtttgcagatctggatgtggagatgccgggaatcaccatgtgggttatgaataccagtgagtggatgacagaacactggtatatgatcctgggactgatcattctggtaatcgtggcatataagatgatttataagacagaacagggcagacttgccatcgacagggttaagatgaagatgcccttgtttggcaagctgacagtgaagacagcctgcgcacagtttgcaaggacaatgagtacactgttgtcgtcgggtatctccactattgatgcactggagacagtgtccaagatcgtcaataacatccattacacaaatgcgctgctgaaagcacgtgaggaagttatgaaaggtattccgctgtcagaaccgctaacagcctcaaagatcttcccgcctatggtgtgccacatgactgggatcggtgaggagactggtaatattgaggatatgctggagaagctggcggattactatgacgaagaggtggagatgactacccagagtgtactggcggctatggagccgttaatcattgtgtttatggctgttgtggtcggtacactggttgtggcggtggtttcaccgattggggctatgtacagtggattggataatctgtaataaaagtcccggattgcgattgggaaccgcaataaaagtttccggagaaacaggatgtgctgtagtctggcataggagactgcattcatcagatacacacactaaacatgaaaaggagagatgtaaaatgttcaaatggttcaagaacaaaaagaaagataacaaaggtttcacacttgttgaacttgttatcgtaattgcaattctggcaatcctcgtaggtctgctggcaccacagtacaccaaatatgtagaaaaatccagaaaagcagcagatgcaagcaatatggatgagatggttaaggtaattaaggtttatgcggctgatccggcgaatgagttggaagcgggaacatatacaattgttatgtctaaagaaaaaacaacaattaatgacaaggaagagccagcaactgatgaagatattgctaaattaacaggatgggaaaaagaaatgcacgcttccattcctaattggtcaaaaacgaccgtaaaatcccaaaaatggggtgataagggagcttatgatactattacagctaaagtaacagttggaaacgatggaggtacatcagtaaaatatgaaggtgccaaattcaataactatatgacaacaggctcagaagcaggtaaacagtaattatattgtgttatagtgaggtgaaaaaatgtttaagaaaaataaaaaaaataataagggttttaccttagtagaattagtaattgtaattgcaattcttgcaatcttggttggtttattagcaccacagtatactaaatatgtagagaaatccagaaaagcagcagatgctagtaatatggatgagatggttaaagtagttaaagttttcgcagctgatcctacgaatgaacttgcagctgacacttatacaattaaaattagtgcggataaagcaactggtacggataaatcaacaactattactccaggaaagaataccactgttgttactaaactcatagcagaaatggataaaactatcccgaattggtacgataccgttactaagtctaaaaaatggaagagcggagaaaaggcagcaattatagctgtagtaactgttaacgaagagggtggaacaagcgtaagctataaggtagatggagatggaagtgctacagatccatttgcaaactatatgaagactggtactgacggaattcagtaataaaaatttgcatatcacattattttttaatctgctatagcttataaaaagaattattagattatgatgatatcaagctaaacaatgatttcgggaatcataaggtaaatacctatgattctcgaaatattaatatgacttactacaaataaagaagtctggcaaaaattaatgtttcacttcaatagaataaggctcagaagatgccaaataacgataaaaacgaaaggattttcctatgctcctttttttaaatttactcccttacatagttatttttatattcggaattaccattggaagtttcctgaatgtctgtatttaccggattccgttacatgagtccattgtgacggtgccgtctcattgcatgacttgtgggaagaagcttaagtggtatgatatggttccggtgtttagctggctggtgcttggaggaaagtgtcgtaactgtggctcttcgatttcagcgcagtatcctagcattgaagcagtgaacgggttgatttatgtactgatctgtgcagtcaatggtctgaacagtttcagcctgatctattgcctgatggcgtcagctcttctggttctgagtgtgattgactggcggacttatgagattccttttggaatcaatgtgtttctgtttgtccttggagttgccatggctgtgcttgacagggggaatctggtggagcatttgattgggatggtctgtgtcagtggtgtgctggagattctttatctggtgagcggtggcggagcgatcggcgggggtgacattaagctgatgtttgcctgtggtctgatcctgggatggaagctgatcttgctggcttttgtgctgggatgtattatcggctctgtggtccatattatccgcatggtgagaaagaaggcagggcgtatgcttgccatgggtccttatctgtcagccgggattttgctggctgctttgtggggaaacaggtggatcagctggtacctgtcattaatttttaactgaaaatcatagaatttttcagttagaaaaatgagttttaaaatgttttatctgttaaaatttatttttgtaattgaaaaagggcggttgtctgcagagggcagcggcttatacggaggaaaaatacaaatggcgagaattttgagtatagaggcagaggcatctcagatcagggttgcggaagttgaagtacgtggcaaaaagggaaaaatccataattgtttctgtataccggcaccccagggagctgtggaggatggacagatccgtgatacaaaaactctcggagagaatcttaaggcagagctttcccagagaaagatcaggacaaagaaagtatattttgccacaggttctaccaggatcgcaagcagggaagtccgtatcccttttgtgaaggcaaacaggatacagagtattatagaggcaaatgccacagattattttcccattgatgtgagtaagtatgtgctgtcctacagtgtgattgatgtggagagccagaaatctgaggacgggaaagaagagacaaagcagtaccatctgatggtttatgctgctccgaaagcaatctcagcagcttacagtgagtttgcggagaatgcaggactgacaatgaccgggatcacctgcacaggtgacagtatttatcattcagtaaaggatgagtatgcaaaaggaactcatattctggttaaggtggaatatacgggaaccagcattacgatcatccaggatggtgaactgaccctccagcgtaatattaattatggtgtggacagtgcggcagagacagtaagggctttcccggagtttggggacaggctggatgcgaatgaggctctgaatgtgctttgcagcagaaaatgtatcaatcctttccttgacatggagtcttttgacgaagaaatctctgatgaggagagaatgctggaaactgccagagctgaggtgacagaaagcctcagatacctgatcggaaatatttcccgtattatggactattatatttctcgtcatacggatacaaactttgattctatcgtatgctgcggtcttggcgcacgggtaaaggggctgatgcttcttcttaccaatgagctgggacagcaggtggacgtattacaggagtttaagaattttgccctgcctgcaggcggggacgcacaggaagcctgcctttacgctgcagttctttcaccgggcacttcaggtgtaaacctgatggacaaggtcaacagaaagaagaaagaaaaaaaagagactttaagtggtgccatcattatctgtgtggtcggaacagtggcaggagttgtgctgacagctgccggatatgcaaaccgtatttatcagcagcatgagcaagagcggctgaatcagagaatctcagaagagagctccattgaggagatttacagtgcttataccagtgcaaaggcacagtatgacaattatcagaatatgtatcagtatacaaataccccaaatgagggacttaagaattttatcgaagagctggaagagaaaatgccttcggatattacagtggagaacttcagctctacaggaacgcaggtcagcttttccatgcgtgtaggcagcaaatcggcagcagcgaacacgattatgcagcttcgtacctttgagagtctggaaacggtaacgacgacaggaatcgatgagggagaagacggaactgtgtcactgagtgtgctttgtacctattcagatccggcaccactggattcagacacagaataaggaggcagaaatcaagatggacatgaatatttctatgcgcgataaaaaaatactgctgatgttcttgggcgtaggtatctttgctgccggatatttcttcggatatcgtccgcagatggaggaggctgagagtattcaggcttctaacgcacctttacaggaacgattaaatgatttgataaaactggctgagaataaagatttctatctggaaaagacagattccatcaatgcaaagattgacgaatatacatcagcatttccggcagatatccgttcagaggacggaattgtgctttccatgaatatggaggattctctggatatgcagatttccaacgtaggacttggtaccagggagtttatagcggctcttgatggaagtacagaggatccgttgctcaatatgcctgatgaaactttgtcggagcaggcaaatgcccagacgcaggagcagcttgatgagatcgaaggtacggatgtgcagggcgacaaggaacgccagaatgcttcggatgaagaggtggcgaatctgaatcagacgtttacgactccggtgctttaccgcacacaggacagtatgcagtttaccggtacgtatgcaagccttaaggatatggtagattatctcgcagatcagagcggcagaatgacacttgataatgtaaatgcttcttttgactctactaccggaaaccttacaggaagtattaccgttaatatgttctccatggcaggaaccggcaagacttacactgagccggatgcaggaagtgtggcgtacggaaccagcaatattttcggaaccattgaatctggcaagaagagtaagaaaagtaaaaagagtaggaagaaagccgcagagacagctgatgcacagagtgcagacagcacgacagaccaggcggcttccgatactggcgttgacggccagaataccaacagtcaagaaggagaaaatacgcaggatgcagcagcccctgttgatagcgccgagcaggcacaataaggaaagtatgttagaggggagagatataaggcccctctaactgtgttttatgaggaaaagagcattttgattataaattatgacagaagagaaggaatcatacagttggacagaaaaatgaaaaataattcaaacgcaggtatgacactgctcgaagtaatcatcgcagtgagtattttttcaatatctgcaatcgtgctcctgcagagctttgtgacttcgagccggatcaataagaagtctaatacatatctggaagctaccagtacagcacagaatgtgatggaagaaataaaagcaaagagatttcaggaggtcgcacttgcgtttaattatcctgttgatcttactaccaatagcagcagatttacatttctggattcacagctttctgaaattaaggataatactctggagattaaagaagttgccagggacgatgatggcaattatataaatgtgcgaaagtataataaagcagatggtgatgacgattcaaaagttactgcatccgtaatttctcatgatagtggaaaaacctacaagtttaatgcaaatgacagtggaaaatattattattctatgtctaatgtgaagaatcttaaggaaacttttgatgtgctggttgaatttgacgggggagatgatacgcaatatagaaaaaaaacgatttccaataatgaatatggaaaaaatgactatctgtccccgaacattgcgaagcttgacacaaaaaaaaacgcgtttcttattatggagaaagactggtgttcaagaacaaaaatagaagaactgatgattaagccgcaatggagagcggcacatgaaaagtggcaggatgaatatgatgactgggttataaggcatactttcgaagagaggcaagaagatggaactataatatatcatccgacttcggaagaaattttgaattacaaacaagaaaatcctgaaccatcagaattggattatgaagatgtttatgcacatacaaggcgtattttgaaaattaagctggaaaagagtggtggcggaggtattattgtaaaagcaagatatattttatgtgcgtatgattacacaaaggctaatgccaaagcgtctgaatatgcaacaatgtcgttttgtccatgtgaaggtgagagtgcaaatcttaaagatggtgaagaaaagcaagctgactgtttctgcacagtgtacaatgattacacgactttttacagttctgagaatgaagatgatcttcagaatatatatatattctattatccaaattataattcccagaatattgttaagccattagatgaaatatattttgataatacagatattaaggtaaaagaagtaaattatccggttaatctttatgttacaaaacagcgtgacgagaagaataatgagccaacttcagcacaggaaatgcagtacaaaatgtctcttactatacaggaaagtcctacaaaaccatggagcgcgaatatgggattgtataaggcgtccaccacattgctgacaaatcttgattatgatatcagtaatattaaggaaattccgaaacgtattagtgcaaatcagatgaagctgacttatacagatatgagtaaccataaaatgtccggatatagtgccaagaacattttgtcatataatggtcttgataaccggcaggcggaagaccgcatttataatgccgttgtaaaggtatacaagcagggagcggcacaaaataatttcccggaaaaggatatgattgtcagtcttgatggggcaaaagaaaactaacagtcaggaggaataaaggtaaaatatgaatcaaatttcaaaaagaaaaaagaatcagggtttttccttactgacagtaattgtagctgttgcatttattggaattctgggaatgctcattttatacattgcaatggcgaattttcaaatgaagatcacagacttaaaaggaaaagacagcttttatacagcagagaaagcgctggaagaagtcaggacaggtttgcaggaggatgttggagaggcaatgtctactgcgtatatcaaggttcttgagacttattcccaagattcagatgtgacttctgcagatgctacactggacgaattaaggcaggcaagtttcaaggagttatttgttaaagagttgactgaacgtttgaaaaaagggacagatacttctcagtatgacctgcaaaaaattaacgggtatctggatcttacaaatgagactgaatttgacaatgccaaagagacggtgattgttacaaatccaacaggcaaatcaccttctatgataaaagatgtaaaagatggaattcttcttaagaatctgaaggctatttatgtagatgcgcagggaagggcttcgattattgaaacagatattcgtcttggtattcccaaaattcagtttcctactccatccacacttccagacttgatgaatatgattgttgttgcaaataaaggaattgtatgtgagggcacagacattactcaggagactgtgattcagggaagtgtatatgcaggtctgctgaaggataaacagtctgatcagatgatagcagatggctcagataaggtcagcgttgaaattacacctggtgcaaaattgtctgtttcatcaggggataaatttgtctgccagggaaatatcaatgtaggcgccggaggcagattttccagtggctctattgtatctgtctgggctcaggggataaaccttacatccgcaacagttgaacttttgggaaaaacttatttggcagatgacttgacagtaaatactggaaagaacagtaatgtgaagatagagggagaatattatggatttggcgcagcagattctgctaaaacctccaaaatatatcataataatgacgataaagagggagttacacctgtttatgattacaagggacgttcagattcttcattaagcagtgccattgttattaatggaaagaatacaacaatggacttgtcgggcgcacagagaattatgcttgccggaaaaaattatattgcaagtacgaaaattccgtctgaaagaggaaataaatcggatatcatgacaggagagagtcttactgtaaaggggactcagcttgcatatctggtacctgctgaattgattggtgatggaacacagacaaatcctatgacgtatgatcagtatgtgacgctaacagcaaatgataaaaaaatagtgattaatgacagtgttcctgtgactcagtggggaaatcagacgctgaaacagataggcgtagatgaatcaaaacccgtacaggaagttttttataatgataatgttgccggaggaggatttgtatatttttatttaaatttcacagacagtacaaaagcggctacatttatgcagacatattatgctgttgagaatataaagacaaatatggacgagtacttaagcttttattttggcgaaaatgccggtgtaaaggtaaatgatccacaggcatatctgcgatatattacgaatggaaatgttttaagttctattttggatgctgatggaaagacacagaacggacacctgtatgaggcgacagatacaaggcctggaaaactgcttagtgaggaacaggtgaaataccaaaatatgtggtataccttaaatagaaagatgatatcaagttatgatctgctgaagaaagatgttaaagatacagaggtaaattctcatgatgagagacaaagcaacaggactgtgtttgataatctggtaaataaagacgggatgcgtaggtttattaatgagaaaggaacgacatcttctgatggatataaggaatatcgatttaatactgaaaaagataacgcaggtttgacagctattatggctgacaatgagaatatagatacactgacaatcaattcagaaacagcaaaaaaattgcgtctggtggtatgtactggagatgtaaagattgatgttggagtaactttcaatggcattatcatggcgcagggaaaaattactttaggttccggtgctaaacttatttcatctccgttggaagctgcgaaagtatttcaggcacagatggatgcagaagcaggagaaaaaatatctcctaaagatttcttttgggaaggtgatcagtatgttcttggcaattctacagcgacaggaactacatcaggtaacaatcttgctgataacacatatgacctggcacaatgtgtaacttatgaaaactggaagaagaaataggcggtatttatgaagaataagaacaaaggttttacattagttgaattagtgattgtggtagcgatattcaccattcttctgggaattttagagccgtctgttaattcgattttcggattccgtgtacagagggctgccaacagtattggtgcggcgctggataagacaaaaacagaagctatgaaccggctggtaggtgagatgaaactggaaaaacaggatgacggatattacatcagctattatcttgacagaggaaaagccagtgaaggaagagtgaaacaggaccaaccagaaaaaattgccccggccggtacaaagattaaaatctatacaacagataatgaggcaggcaaagaaatggaatcaggagattctattatcattacttatgaccgggagagtggaggtttccgcccgttgcaacaagatgttatgacacaggaacaaatcaacagttatcttgaacaatgtgcagatattccttttttggataatggagaaaattattgcacaaagatagaagtaagaggcggatatagaatcagaaaccttgagttaaataaggataccggcacttatacgataacagccggctgatagaggggacagtcacatgaaaaaaaagaacaaaggttttacattaatagaattgatcgtaacggtagctattatagcgattttttccggagtagtactgtctgtgataggtacaggtgcgaatagttatataaagacttcaaacactgccaaatcacagatggaagctcaggatattatggatcagatggagaatatgatcattgatgtaaaccgtagcgtatattatgcgtatggaaaaggtatcaatgatggatacgggaatgaaatccgtaatgatattgattcttcggacagttctcagtcgaagactttctttgcgtgcagtgcagaagaaaaagatgcggtgcagaaaaaatatgcatactcatgtgacataatcgaatgggacagtgatgagcaaaagctgtattacggatgcagagtctgggaaggcgtggaaacagaaactacagataattctgcagctgatggaacagaaaatggaaataccggaactgatacacagagtattacggataataatgcgatggtggcaggaatttctgatgatagcgcagacaatacaaatgagaaaacagaagataatattattgtaaaatccaagcgaaccacagaagttacaacaaaagtagagaaaactttgatagcagaagatattacaagcttttgcgtagatgtgtccaaagcacagacagaccgcattgtacgatttcagtttacaaccaataaaaaaggaaaagaaatcacaaccattcatactgtaaacctgagaaatcaggtacagataggaaaaccgggagacggttatggtacggctgaaaatggaaatgcatggattaatattgtggattatccaaaagaaatcaatccgggagagaaactttcaggatttagtaagcgtatgaatggaaatattgacccaagtacagtagagtggattgtagaaacagcaaatggctcttttagcggtacagataatatagatcttgcgctgacagcagcagattctgcaacgggagaaattcgaatctatgttcaggcaagcacaacagatggcaggcagatcaagtctcagacagtagggattaaggtaaattcaaaaataccggctggtctggagccagtggcaggaaccaatgaacttctgctggcagtaggacagaattattcgttagctaatataatacaatggagaataaaatacagtgacggaaccaccggcgagtcattagatgcggttgagtggactacaacttcaaatataggagtcagtcttggaaatgacggagaacttattataccggaaagtttgggaaatacttcttctgattctttctttaaaatttctgtatcttatacagatagtacaactgctaaaactctgtcaggagaaatctcaataaaactggcacgcttagatctctctcaaccggaaacattatatgtaggagataccatgccatttgcttatgaatacaaagagggcggaaatgtaataacgaatctttctgatgaacaaattacgaaaagtgtcattcctcagactaataaagcagccccgggaaaaataggagaagtactgactgaccaggatgtaggaaagtggactgcgaaagcagaaatggaacttgataatagaggagggtatggaaagttaaaggcagaaagttcgtttaatgtcaaacaaaaagtagaaaatggaacaatagaaataggaagtactgaagcaaataatgacacagtagttgctggcgctacatattactgttcatattataattctcaaggttttcatgtgaaggaggtaagtgatttttcttggaactataaaatagagtggtctattaaaggagcaacagattcttacttcatgaatgccaataatataagtagtggaaataatgatgcacaattatatattggtgaaaatgaacatggatttacattgctggcaacaatgacaatttattcaggaaacaatcaaaatgagaatgaaattaagcatcgttatgaggccaaaagaaatgtaaaagtaataactgatatagaaattgtggaaccgccaacaccaatgcttataggaaaaacgtatgctcttagggctgacgctactgtatggagtataaatgattcaggacaagatgtgtctgaaaagaaaaaagttccacgaaaagagacagactggaaaacaaataccggtcatactataaaagatgaatcttggaagattgaaaaaggacagcaatcgggagaattaatcgcagattgttggggcatgccaaatgtattttttggaaatgaaattaatgatccgaaaaagaaagttcatctcattgattcaagatggacagacgtaagaaagagcgcagaaataattataaaagataataagacatcaatatttccgggtgacacaacccagctatggctaaaattacaaaatgaacatggacaaataacaggaaatgttagctgggaaagcaatgatgatagcgttaaaataagtcctgatacacagaattctgtatatgagaatggggcagcaatacctgttacagtaactgctgattctgatattactcaaacggttacctgtaagataactgcaaattatacaaatgcagatggtgaaactggaacagaatccgttgatatttatgttactcctttaatgatgagtctgacacattcaaatgatcagctattttttgaggacaggcaggtgactgaacaaataactgcatatatacaggatgcatctaatgatactgatgttacaaaggattatgatattacatggacagtaagcccggaagatggaaacgtttatacatatagtcctgataataataaactcaattttgtggttattgcgaagccatcatcagaaagaattgttatgatcaaggcaattgccagaaagaaaaattcagataatattgcgtgtacggcatcaactcagattactgtaaacagtaaaataactaaaacgcgaatatataattgtactcaaggtcagtcacagtctttggaatttgatgaagatgacatgaatctgataacaaagagcattaagaccaggtatgtattgaatgcagaaaacagtcagatagaatgcaatcgaaataatattcctacgctcaaattagagggagataggccggaaaatctggtaattaaaatgaacgcttcgacgactgattttacacaatatagatatatcttgatatctgttgatttgagaagcgtgctgtacaatttttatatttatccaatagagaataatgtatatgatacagagtattcagaaaatgctggcaaaccttatacttatgttcccggagatttagagtcaatcaagaaaatggcaactttggagagtgacggatatacgtataaatttaaggacagcaagggagaaatatgtgaattacgtttaagtattcacagaaagactggaataggctcattctctggttcaattgctggctcttcggcaggcaaatggtttatgcaacgtggcaatgtctattataaatatataaataatggatggtatatatttaataatggaacagcatacagttgggattggtataatagggctcagtgtacaagatattattggaacttaaatgataagattagactgttggatgatttaagtggaatatctaataaaacattctggcagaggtggaattaaaccaggtcatcattaaacaaaggaggacgaaaccgcatgagacttaaacataaaaaactcttcatatctggcatagcggtaaccatagcaggggtgcttggcgttggagcattgctccagacaagtgtctctgtacaggcttcttctgctatgatgcctggagtggagcagattgtaaatgatgctacggcagataaaccatttagaattctcgaaatcgtagataacacagacgaggcggaaatcggatattatgtgtctggtcaggaaccttatattaaactttataattatacatatacttacaaagatgagaatggtgaagagcatcagaaaacgattcctattaacactttggaagaaggcttgaaaaaaatagcgtctgtcagtcagcgtaaagaatttgctacaaatacaaaagaagatggaagcgatacaggtataaaaaatatacagaacatcagctatcagaatgacagcagtggtgaagagaaggattacccactttcctatacgccatatgaagaaagatattttcttacttccgaacaggaaaattccaaagaatggactccaataactttcgaagatgcagaaacggaagcagtcagaaccgatacagttaaggttaaaggtaagtatcagccaaattcagacggcacaggtgattacacgaagcaggaacaaacttattatcctattcgcagggactctgagacagataagtccagtacagagaaataccgcgaaaatattcagaatttctttttctcagataatggtgaagcaaatgaaccatatttcctagaatttgaagaggtagataatagcagtgtgaatgaagcctttgatgagaacaataacaagaaaaatggaaatgccattttacaggaatatgattatccaaaaggcggctatggttattatgaaaatgtttatggtaatctgacagaagaaattgtaaataatataagcaatgggagctatctttttccgggagaaacaccccaaatagatatgacgcatgcggttaaagttcctgttgaatctggaaatcagacaacgaatgcgaaatcttttactgatggaacagatgatttttctgctattgatgaagcagatacagcaattcaggaaaccggacagccagacatatcagcagattcagctcagttcggatctgcggctgagaatgctttttcatcaggagatttttcagatggagatactggaaatgtatcagatgcaggaaatgcagacggtgcgcagatgcagaatccggatagcacagcagatgcagatacaggcattgattcaggaatagtaacggaaacatactctggtcaaactacagtgatagaaaatgataagatacagccgcttattccgtatacgcaggagataaggggagacacaactaaaattgattcttctgtgggaacatctgagaatccgaaagtatatttcggaataacgacagatcagtatccatattatgaatataccttgcttagtgacatgaaaaaaatagttgcctgtgcagagcgaaataaagcagaggtagaaaatggaacatatacgccagatgcctcagacaaagagcataatataacatttcaggatggtcaatattggtattggacaatagaccagcagggaaatattacaaaaaatccgatttttattgttacctgtcgtcagccggtttcatatgataatgttcaaaaactttctgaaacattgcagtataattattattataaagtaaaacaggcttacttctgttgcaaaacagatgaaagtgattcggagaatgaacatgcatacaagtactttggatggtattctccaggttacccgaaagatgaagatgtttacgtttcagttaaagacggggaaactgcgacacattatatttcggctgcagaatataaactgactccggaagttggagattatgattttgttccagatgataatgaggaagagacgacagtagaagttaatcatatgtattatcgtggtggatatacaaatcatgactggtttaaacgttatgtattccatattaatttagatgatgaaaaggaaaaggagaaatacgcttcattcaatattgaggttaaaacaattacttcggcggaatttaatgaaacatatggtacggcggcagccacagaagatttaaatgatacggatattcaacagacagacgtatcaacggagaatactgctttttcggatgagccagatacggaatttacggatgatgaaagtgctgatacattttctgctggagaaacaaagaataatacagatagctcagatttatcagaatatgatttggtctatatgaatggaagtggtttaaatgaaacatcttttaaggcactggcatcattggcttcaaaaaataaatttccatgtattgttaatcagcaaaaattaactacaaacattgattttgtaaacgcatttggaagttttataaataatgaggatgcagaccagcattatgtgacaaaatctgtatatttctttaataatacatttgctaatcaggatccttcgagccttctaagcggggtattccatacaaattttaaccttggttcagacagtgatatttcagacggaacgcagggagaaactcaggggtttgaagaaatattagaatatattgcaagtgaaaataaatatcgtcagctgggaaaatcaagcgaagataatattacagatgatagtcaacagatatcagctcctgattcgtcagaggagctacttaatacagaactgtcacatgcgagagcaatagagtatattatcaattacaaattgaaaagagctcaggttacaaaggataagataaacgtacttgaacttcagccggctagaagtagtggcgaaattacaaagtctgagattatgggctggctgggttatatgacagttacgacctgctgtaataataaagatagcggtaatctgttgccaaaagatgacagtgtatggatatcggatgagacaatagaccatgtgcattatgttcaatttgattttgcaaaagaagtagatattgatggttttatttatacgacccggaaaaatatcggtgaaacaaaaacgggcgtgttggatgaatataaggtggagttatgtggtgaagatggaaataaaatctttgaaaaagaagactctacacattacaattggtacaatattgatacgggagaaaagatatttaaatttgctcagacagtaagatctgtgaaaaaaatgaaaatttattttacaaatacatttggtgattatgacggacaacagaagttttgggcaagtgcttctagaatgcttccaattgtgaatgaaaacgattcaacgatagatattacaactatgacaacatcagaatttgtcggtcatattgaagatataaatacaagatatgatatgatttatttgggagatgatgataccgatcttaattatgatgcgaacttccggccggataatacgattttgtattatcacattggtggaagtaagaaggctttatatgagttacagggtctgatgaatcatgattatatcagtcaaaatggaacgattttggcaaacacagtaggagaaacagattcagaaactgggacaatgataggttcagtccgcgggtctggaaatgatcttacagaaaatattaaaaataaattggtagattttgtagaaagcgggtatccggtggtagtagcaggcaatatttataatccggagaaacaagaaatctctacagaattaattgacagttcatcctatgtttatgatttcctaaataacgtaaagacatatagtaatgtatatcgtgagtctgaaatagggactgaatcaggtgtagacttttttgcgtctcttcctaagcctaagataaaatttgttgatgaagattcatttcccccatcagtaattggcgatgaaaatggtcctgccaataattgtcttactggagataatatgacttttaagttccagataatagatgaagctcaggcttcaccggcaaatgctgactataattgtgaattgtatattgatttgaattgtgatggaaattattcagcttcggagaaattgaatgatattgttgttcttcagaatggatcagctttaaaaagtgataaggaaggaaagtaccatctttctttgaaaacagaatatacagtgtctagagagattccacaggaatatattaagctgatgccatggaaattggttgttacaagtaatagcaatagtgagataagaacatcagaaattggatatacaaagagaagaaaaagtgatgccgtcaataatacaattaaggttctccagattcaaccggatcaatattgtacatgggatcttacaaaggatgaaaattttaaagcattatttaatgcagtaaagcaagattttgatgttaaaattgatgctgttactgtatcaaaatatgaggagaactataaaaataattctgcatatttagatcaatatcatatgttaatagtaggattctgtgatggaaaaggttatggtggaagaggccccgactataccggatacaatggaaactttactgaacagggagtgcagggaattcttgatttcgcaaatacaggaaagagtgttattttagctcatgataatacttcgtcctcaaattatgatgatgatgcctctaaaaataaattaaatgataatggaggaggtgatatctggaaaggatgggcatattattttaaccaaaaacttcgttcagtttccggaatggatcgttatgggattacagtaacagaaacttcggatattttaaaacaggcgcgaaatttaacaataacagactcggcctggaatactattttgagtaattctgatgatatggcatatcgattgaatagtcagaaaatgcaaacgtattctgaaacacagggttttactaatggcaaacttaggattgcagtaagggatagaaagcaactagcaataacagatccctattatgaagcagaggatgaaacacataatccaacaacaacggaagcatctcaggtaaatcagggagcaatcagtgagtatccatataaaatcaatcagacgattccggtagctgaaacacattttcagtattatcagcttgcaatggaagaagactcagataatgatggaaatggagatattgtggtatggtactgccttggaaataaggataatacggagggcaatttttattatgatcatacaccaaatgatgtaagaaataattattatatttatagttataaaaatattatttatactggggtaggccatagtaatgttaataatgatatggagaaaaagctttttgtaaatacaattattgcagcatataatgcgcaggcagttaaaccaaatctttcgtttgtaaaacagtccgactggaatgcagaagaggcaaagaatgtttattatatattagattatacaaatgataatcagtctcaggaactggtgaaagatattcaggattttcatctgaaagttacggattcaaaccttgtaggtacatccttttcaggaacaaatacaaaagatcttaaactggaactgtttattgaatctgacgatgaagatgcgcagaatatcgaaggcattgacaaaaaggtaaaagaggttaaacttcctatttatacttcaggaacaaattcgcaggtacctgctgatacaaatggagacatttacgtatatagtggaaatgtatatgactttgcactgggagacttgcagaaatatttaagaaataatgtcaatgaatacagaggaaaaacaatcttatatgccagaatttcctgcaggtatttgtattatggtgtagaaaaagaagcacagtcaattgcaaagatagacatatgccagcgtcagctttttgacttggattgactttatatttaagaaaaaatggtttcatggtattgaaaaataatgcaagtgcctcaaaacatggcgtagtgactgcctcttccatccctgatatactgtgataaaccgtatatttaaggaggcacacttatggcaagacaaaatcaggaaaggaccgattggggtcgcacccctcaaggactgtttttgaggcgctccctttatgaaattaaaaaattaggaaaaaatattattgttgtactgtatgatgagtaagtggtataataatacaaatttatattgcagaaaaaagctgttgttcgtgagaggctgggaataatgattgagtggaaacaaatgacgatgcaggaagcagagaataaaatggaggtgcttcgggagatttttgatgtagttcgtctcctgaaagggagtgatctgcaggctgccggaatggaaagtaagcttgcaggaagagaaaatctttgccagtgttatgctttctggaataaagataaaagatgtgagaattgcatttcccttaaagcactggaggagaagaaacagacatccaaaattgaatttcttgattctgatatgtatcaggtatttgcaaggtatctggagattgatgatgagccctatgtaatggaaatgctgaaaaagctggacgagaacacgctgacagatgaggaaggatatgaaaaactgacggaaaagctgacagtatatagcgaaaagctgtataaggatgtgctgacaggggcgtataatcgcagatattttgaggaaaaagtcaaaaatatgtctttgaatgccggagttgcagttatcgatctggatgatttcaaattgttcaatgacacttatggtcatgatggaggagatctggtactgacaaccgtagtaaatgtaattcgacattatatccgtcgcacggatattctggtgcgctatggaggagatgaatttctgctgatcctgcccggaattgagaaggaagtcttttcacagaagctccgtatgatccaggagaagatccatgcgacgcatattccgggttttaatcgtcggaagctttcagtgagcattggtggagctatgtttacccatggcagattggaggaagcaatcaccaaagcagacagacttatgtatatggccaagggacataaaaatatagtagtgacccggtgggagcagaagcaaaatacagacaagatggaaaaaagaaacctgcctcagcttctggttgttgatgattctgaaatgaaccgtgagatacttaaggaaattctgggaaaagaataccggatactggaggcctgtgacggggaagaggctctgaagatgctggagcagtatggaactgaaatctcattggtcctgttagatattattatgccaaaaatggatggatttgaagtactcgcctatatgaacagagataaatggatcgaggatataccggtgatcatgatttccagtgaaggatcagagagttatatccgtcgtgcctacgaactgggggcttcagattatataagcagaccatttgatgctaaggtggtatatcagcgggttatcaatatgatcaagctttatgccaagcaaaggcgtctgatccatctggtaacagatcagatttatgagaaagagaaaaacaaccgtatgatgaccgggattctcagtcagattgtagagttccgaaatggtgaaagcgggcttcatgtgttgcatattaatattctgactcagcttttgctggagaaattgatgcgaaaatcagagaattacgatctttcctggtctcagcagcatatgatcgccacagcttccgcacttcatgatatcggtaagattggaattgacgaaaaaattctgaataaacccggaaagcttacaaaggaagaatttgaagccatgaagcagcacacgatcataggtgcccggatgcttgacaggctggaaatgtatcatgatgaagagatgatgaaatatgcctatgaaatatgccgctggcatcatgaacgttatgatggaaaaggatatccggatggcctgaagggagaagaaatccctatatctgcccaggtggtatcactggcagatgtgtatgatgccctggtaagtgaccgggtatataagaaagcatattctcatgagaaggcaatggaaatgatcctgaatggagaatgcggaatgtttaatcctcttcttttggaatgtctggtggaaattcaggataaagtgtgcaaggaacttggtattaaaggtgtgaatgaatgtctggaatatctggaagagagaaacagataaaatccctctgaaaagagcttaaactcagcgatgaatgggtgtacatttctgtagatctgaatggattaaaatgggaagacagagtgatcaagttgaacgtgcagcctgcagcagtgggaaatcaataaatttctatcagatcagaaggatgcagagaatgttgcggctttgaaaaataataaatggtcattacagagattgattcatgaaatgcaaaaatattttgtaaaaaattttcctgagtatcttgacagggaataaataatcctttatagtatagcacagatttggtgtgttactggacaggcaggcattaaccggtcataaatgttattttttaatgtttatgggggttagtgcctttttttgatgtattctttgtggtaaaacgcggaataatcatatgtcagaaggttttaatctcccggaaacaagacggtttattcgcacgaataaggaaaaggagacaaaagaacatgaaagacaagatttttggagttttgcagcgtgtgggaagatcctttatgcttccgattgcaattctccctgttgcaggtttgctgcttggtatcggcagttccttcacaaatgaaacaactatcgctacctatggattgcagaagatcctgggaagtggaacattatttaattctcttctgatcattatgaacaaggttggaagtgctgtatttgacaatctgccgctgatctttgctgttggtgttgccattggtatggcaaagaaagagaaagaggttgctgctctttctgcgctgattgcatatttcgttatgaatgtggctgtcagtgccatgcttcttatcaacaatgaaatcacagcagacggtcagatagcagcagatgtactggaaggaaccattacttctgtatgcgggatccagtctctgcagatgggtgtattcggcggtattatcgtaggtcttggtgttgcggcacttcataaccgtttccacaaaattgtgcttccgaatgcgctgtcattctttggcggctcaagatttataccgatcatttccacgatcgtatatatgtttgtgggaatcctgatgtattttgtatggccggcagttcagaacggtatttatgctctgggcggtctggtaacaggcagtggatatctgggaactctgatttttggtattattaaacgagcattgatcccctttggactgcatcatgtattttatatgccattctggcagaccgcagtgggcggaactatggaagttgcaggacaggtggtgcagggcggacagaatatcttctttgcgcagcttgctgattctgcaaatatagcacatttcagtgcggatgcaaccagatatttctctggtgagtttatctttatgatttttggtcttccgggagcagcgctggctatgtatcgctgtgcaaaacctgagaagaaaaaagcggcaggcggacttcttctttccgcagcgctggcatgtatgtttactggtatcactgaaccgctggaattctcattcctgtttgtagctccggcattgttcgtagttcaggtgatcctggcaggtgcggcttatatgatcgcacatatgctgaatattgcagtaggacttactttctcaggaggtttccttgacctgttcctctttggcattctgcagggaaatgcaaaaacaagctggctgaggatcattccggttggtattatttactttatcctgtattatgtaatctttacatttatgatcaggaaatttaatttcaagactcctggacgtgaagatgatgatacagagacaaagctttatacaaaagctgatgtaaatgcaagaaaagaagccggaaagacagccggtgcagctgcagcaacctccggtgatctggtaagtgaactgatcaccagaggccttggcggaaagaaaaatatcgtagatgttgactgttgtgcgaccagacttcgtatcacagttgcagagcctgagaaagttcgtgatgaacttctgaaacagacagattccagaggaatcgtaaaaaaaggacagggcgtacaggttatctatggacctcatgtaactgttatcaaggcgaagctggaagaatatctggagactgctcccaacgaattcgcagatgagacacaggataatgtacaggtacaggaaaatgctgcagcaggaaatgcagatggacagaacagtgcagaggttgaggacaaaaatgcaggtacagcacagtccttggcacctgtaaaagaagaaaagatcagaaaaacagcaatcatttacagccctgtagacggaatcgcagcagatctttctactgcaccggatgaaggatttgcaggaaaaatgatgggtgacggtgcagtggtgacaccaacagaaggtactgtatatgcacctgcagacggtgaagttgagtttatttttgatacaaaacatgctataggtttccagacagattccggtatccctatgcttcttcatatgggaatcgacactgtaaaactggaaggaaaaggcttcgaaatcctggtaacagagggtcagaaagtgaaaaaaggtgatccgatgatgaaactggatttggagttcttaacagccaatgctccgtccatcacttcccctatccttgatactgaaccggaagacaaccagaggatcagacttctggcaaacggtgagattaaggctggtgaaccgttgtttgcggtggagacactggaataatattgttatcaaaaaacagttggatgatcaaaagagatgacatcttgattatctgactgtttttttaccctttttgcaggggggatctggaaatcaaaaatgtaacaaatttgtgtgacgggtaggattcttattcaaaatatggtaaactatagcagttctggtaaataatgcatcttaatccagcccatcagagtatgaaatcctgcgtcagatatctttgttgtgcgtcagcacgcctgcagatattttccttgtctttcgtattctgctgaactgtcttaaatgcattatttactagagtgtgtttgaaaaatgcttttcgcaagatgtatgttacaatttgtagtattattttgcgtaaagcatttttaaacatgttttatgaccaaagagaaaattattataatggcaataaatttttatagaggggattacgacagagatgtacagagttagcaaggtattaaataataatggtgttatagccattgatatggatgaaaataaggagtatgtgattcttggcaaaggtgttggctttggaaaaaaggtcagccagcgttttgataagccggagggatgcactacatatcgtctggaacaggagacagagcgtggatctgcgaaggaactggtaaagggaatagagccggagtatctggagattgcagatgcaattctgacagagtcacagaaagtgtttggagattccatagacagaggaattctttttccacttgctgaccatatttcttttgcagtcgccagaatccgcagaaatgagcagatcagcaatccgctgacagaggatatcaaggttcttttctacagtgaatttaaagttgcggaaacactgaaaacaattctgagagaaagacttcagatagagattgatgatcatgaggttggatatgtggcattgcatattcattctgcaattggtgacgagaaggtatctgttgccatgcagactgcgagagcagtgagagagtgtatagatatgatcgagaaagcaacaggtaagccaatcgatgtactgtcactgtcctataatcgtctgatgaaccatatgaagtatatggtagcgcgtgcatctacaggagagaagctgaatctggacatgaatgaatatatgctggatcagtatccccaggcctataaggttgccactgacatctgtaaaaacctggaaggatgtattggacataagctggatgaaacagagacaggatatctggcaatgcatatccagagagtgtataaggatgcggtatgataatcagtgaagaaagaaattccctgcccggccggaaatattttatttctggtctgaacagggagttttttttatcaatttccagcagaccaatgatcccattcagcggtgtgcgcatatcatgtgacatgcgggaaagaaaattggacttctctgcgttggcgcgttcggcagtgtcaagagcttctttaaggagcttctggtgccggatttctgattccaccacatcgtccacattcagaaatcccagaacaatgataccggagtcttcgtttttgataaagcggaactgatagtagtggataccatccctgtcatttatccggtaatttcccttgtattcggactgaccggacaaaacacccattacattgcccagttccagggattcttccagcattgtacggtcatccggatgtacacgctgccggatgtagtctgagaggaaaagatcataggggtatgtatccttgtgttttttgtcctgatcagggacatcattgtcttcacaggccactgcaattacgaaatcccgatagtcatcggcgtttccgtttctggcaatgagcagataatagtaatggacagtatctgtgacaagcctgaaatggaatttgaaagaggcttcctgagagagtctttccagcagggtttcataattcaggtgtctggacacataggaacgctcatccggatgagtgtgtgttcataattttgtactcctgatgtttagtatttcaaagtatactctttttaccccaaaatagcaataagcagcctctttttcattccctgtaaaatatctttaagtaaagtatatactttacttaaagatattttataatattcatgttataatggttttgtaaagtcattactttcatttttgttaaatattttgaaatattaaatataatatataaatttaattaaaggaggttttactatggaaattggaggctttttcccctatcaacctgttggctctgagccaaacaattatgtggagcatacctgccctgatcccggggacaccgctcatctaatgtccggccgttgtgccatttattactgtctgagggatctgatgttaacagatcaaaagcgtgtggcatatctgccttcctatgactgcgaaacagttctgggctgctttgtaaaagcaggatatgaaattcattattatgattttgacaaaaatctttcccctgtgtttgaggaagagatgatcccgcagatcagtgttctccttgtctgtggatactatggttatcctacctatgatgagaactttgtcaaaaaatgtaaagccagtggcgtttctgtaatagtggatactacccatacagcattttctccattgccggcctgtccggatgctgactatattgcggtcagtctccgaaaatggatgggtgttgcctccggtggtcttgccatcaagcgaaagggtacctttggcgtaaaacctattcctatcaataaagaacagttttcccttagagatcaggctcttcaatcccgagagacctacgagcatacgggaaatgaggattataataaagaaggcaatgatgttttctggaaagcggaatttatgcttcgtgagattttcgatatccaggaaggggatgaagcttcccttaaaacgattcttcattatccattccgggatgccatccgtaaacgccaggaaaattaccgttaccttctggaacacctgccggaacgctccgatatccgcccggtatttccttatctttcagatgatatctgtcctatgtttttccctttctttgtggaaaaccgggacgcccttatcaagcatctggcagacaggcatattccgcctaaagtatactggcctgtaccaccttttgtaaaggttgaagactatccaggagctcaatatatttattcccatatcatgtctgtcagctgtgatgagcgctttaacacggacgatatgcagaaaattgtagaagcctttgaaaactattaaagatcttaaagcattttgagaatatccgtttgataaatctaatcaggccacagactggaaatcaccaatctgtggcttcttcatcttcccaggttgacatcccatctgccgtttgctacactaaaaccacatatctgacaaaggaacgggaaatatgaagaagaaaaaaattataattttatctattatgataattgtggttgccttactccttgaagcgagcattctgaaatatgttaatgacagaaatgcccatagaacatcaaaggtgcttcttgatcgtgtgattactgtgcttgataaaaatgatgagagcaggaacgagctgatcgaatcgttaaaggacgattatattgtaagggctaaagcagtgtcatatatgattgatgccgatccggcggtagaatatgatgtggatgagctgcagaaaatagcaaaactaatggctgttgatgagatacatctttttgatgatcagggaactatttacagtggttctgcacccaggtattttggctataattttgattccggtgcgcagatggagtattttaagcccatgcttaagaataaatcgctgaccatgtgtcaggatgttactcccaatactgcagagggaaagaaaatgatgtatgccatcacctggaacgaagacggaaccaagatgctccaggtgggaattgagccaaagagacttctcaatgaaataaagcagaataacatttccaatgtagttgccggaatgccggtatataaagccatggaaattatggtcgcagatgcggatacacaggtaatagaaggatccacggacagtagcaaattagggaaaaaactggaagatgtggggatatcagcggatcatgtcagtgctgacggtgcgactgtaacacagatcagaatggatggaaagcactgcagatgcatgatgcaccagaatgataactatattgttattgtaactgtagaggattcattttatcagcagggcggcatgattgctatttttatagtaggtgcatatttggtactggcatcctgctgtataacctatatgttttccaaagtgatgaaagaaagactggaaaaagaaaaactgatatacacctcaaatacggatgagcttaccagatgtttaaacaggcacgcatatgaaaatgatatgaaaaagcttaatcttagtgaggaatgggtatacatttctgtagatctgaacggattaaaacgggcaaatgattcttatggccatatggcaggagacgagcttatatgcgcagcggcagattgcatgagagacagctttcatgagtatggaaaggtatacagaatcggtggagatgaatttgctgttatcattacagagaatacaagacagatggaagaactgatacatggcttcgactccaatgtggcaaactggcatggaaagtttgttgattcaatgactgtttcgtacggatgggttttcagcacagagagaaactggggtagtgcatatgaaatctcaaaagctgcagatgcaagaatgtatcagagtaaggaacgctactataaggaaagcggtgcagacagaagataggcagtttttccttcaaatatttgcagaaaaccaaaactctgtcggaatacatcgtttactagaaaaacagaagagacatcaccagttaccgtggtaataaacagcacaaaggagaatagaaatttgagtcatatacctgcaattgttgattatctgaaagaattaaatatattatctgtaatagtcaggatacttcttgccattatctgcggaggagttataggaattgagagaagacgggctcaccagcccgcaggaatgagaacatatatgttggtatgtatgggtgcagctattgtcatggcaacgggacagtatatgtacgacactttcaaaaccggagatccttcccggcttggagcccaggtgatcagcggtattggtttcctgggtgccggaagtattatcacctctggaaaaacgaaagtaagaggcttgacaaccgcagcaggattgtgggtttcggcctgcattggtcttgccttgggcattggattctacagtgcaggtttgattgctacgctggtcgtttattttatcatggcgcgactaaaaagactggagtatcgatttctggtagatgatatttatttggagatttatttggagtatgacgatgcgctttctgtttctgatatcgcacagcaggctgaaagaaacggcctgaaaatcgaggaggtgcaacatggaaccaaaggaaaaggattccagaaggcattgatcactttcagaaatacccaaaatgaaagcagggatcatgtcctaaaaatacttgagcatgtggaaggcgtgaagtacgtaaaatatatatattaatgttgatctgcgcccaatgcttcttcctcagataagacttttttcgtatcagaaactccatcttaaaatttctgctatattttccttaccaaagagatttttcttgcgccatcttgaagatctttttggtaatgctaacatacggagctgccagctacagctccgcggattttctccttcgtgtttccgcggctctgacctatgggggttagggctgcggattttgtttattattaaagataattgtgatatgatacaaaaaacaaagaatttgcaggaaaggatggataactatggatgataaaaggattgccgccgcagaacgtaaacacctcattcctctggacagcatcaacggatatgaagtccgtcccggtttctacgggatcaatggggcaaccgccctcagggaaggtgtaaattttaccatctgctctatggaagcaacaagcgtggaactgcttctgtattacagaggagaaaaagaaccatatgcggttcttccttttcccaaacactaccggatcggcggcgtgtattccatgattgtttttggactggatatctttgatttcgaatatgcctatcgggtagatggtccatatgagcccaaaaaaggtcttatttttgacagatcaaagccacttctggatccttatgcaaaagcagtcaccggacaaagcgtatggggcgaaaagcctaatcaagaccatgagtaccgggcaagagtggttgtcaatgattttgactggggcgatcatgtggatccggtcagaccgattgaggatctgatcatatacgagcttcatgtccgcggatttacccaaaatccttcctccaatgtcgctcatcccggcacctttgagggaatccgggaaaaaatcccctatctcaaggatctggggattaccgctgtggaattaatgcctgtttttgagttcgatgaaaccatgggaaagagagaggttaacggccggactcttctggactactggggatataatccggtaagcttttttgccccgaacaccagttatacagccaaaaaagaattcaaccgggaaggggatgagctgaaagacctgatcaaagatctgaatagcaacggtatcgaagtgatcctagatgttgtttttaaccatacggcagaaggaaacgaaaatggtccctttttctcatttaaaggattcgataaccgcatctattatattctgactccggagggctggtattataatttcagtggatgcggaaacacactgaactgtaatcatccagtagtgcagcagatgatccttgagtgcctgcggtattggacgatcgaatatcatgtggacggtttccggtttgatctggccagcattttggggagaaatgaagacggttctcctgcaagccagcctccacttctgaaaaatcttgcggaagatccgatccttcggaacgtaaaactgatcgcagaagcctgggatgccggtggactttatcaggtcggcagctttccggccttttcccgctgggcggaatggaatggtaaataccgggatgacatgaggagtttcctgaaaggagattactggtttgccaaagcagcagcaaacaggctcatcggatcaccggatctgtataccggacagtatcagggatatgcatcctctattaatttccttacctgccatgacggattctctctttgggatctctactcctacaatgaaaagcataatgaggacaacggctggaacaacactgatggaaatgatgacaaccgaagctggaactgcggagtggaaggcgagacagaagatgcggaagtcctcaggcttcgcttcaggatgataaaaaatgcctgtgcagtactgatgtgcagtcgtggtactcccatgtttcttgcaggagatgagtttggagatacccgttttggaaacaataatccatattgtcaggacaacgagatttcatggctggactggaaacggctgaaaacgaatcagaccctataccagttttttaaaaagatgatccagtttcggagggcgcatccggcaatccgaaataacctggctccttcagataccggctttcctgcagtaagcatccatacaaaccagccacgggataactccatcaatcaggacacaaaatgtctggcagtctgctatgccggaaagactgatcagggagaggatctagtatatgtagcgctgaatgtattttgggaaaaacagcgatttgagcttccaaagcttccgaatgcctatgaatggagacgttttgtagatactgcattggacgaggcagacgaagtaacaattaccgaatactggctccagccgcgttctgtggcagtatttatcggtacacgaacggaaatatagtttttcgcaaattttctctttcatttttttaatctaaaatgactaaagaagaatcattatttgatacagaatttgtttaaaatcagcttactccacaggtagtagcataacctttttaaacctccacggaatttctgcggaggtattttttacaaattgagtcaagaatgcttgtgacttcagtcatgagatgaattggctcaggggctgctgttttttcaaaaaaagtatttttcttcatattgatcttaatcaatatgatcaggaaggaggaatcctttatgcatatgctcagactaaggctgctggtggactaccgcacagaaccgatcgtggaaaaacgtttccggatccttgcgcatatcagcaaccagctccgcaagcatgtcaagaagcagctgtccaggctggataaggacagggtgtatcaggcattgaaaaaagaatacggacgtctgaaaaaactggatcccgacaatcataaggaggtggctgcggacctggcgcgcgtctccggtcttatggatgagactatcaatgagctgggactgaccaaaagcgggctggaaaaatatgccagtgtcatgcagagacggtataagaaaaatatctcctcccaccaggtgcaggcagaggtcgcccatatcctcaaaggccttgagaaagtactgtacggggacggcaaagatatccattataagaaagagcgtgacttcactacgatcccgggaaagagctgttccaatggcgtgatcctccattttgaccaggacgatgaaaaacatgaggtaaactgctatatcacctggaacggcatcaccatcccggtaagatacgatctttcaaaggccgacctgccgggcggcaggaactatgtcaacgaatccctgtcctccggcaagatctgctactgcgagatcaaaaggatctggttccgttccggatataagtattatgtggacatttatatgaaaggggaggctccgaagaaggtggagcccggaaagttcgtcatgggcattgacgaggggacttccacggtcgctgctgtatccggggatgccgtgttcctggaagagctggctccccagtgtgtggattacaataaggagatttcaaagctccagagacagatcgatgtttccaccagaaagacgaacccggacaagttcaaggaagacggcacctgcaggaaaagatccgagtggaaggaaaaacactggacattttccaaaaactgtctcaggaaaaaggcgaagctgcgggaactgtaccgcagaaaatcggcatatgccaaatgccggcatgaaaacctgctgaaccggatgatacagtccgcatcctctttcgtgaacgaacccatggaattctccacactggcaaagaggtcaaagaagacggaacggcaggacaaactgtcagaagtaaaaaagaaggacggttccgtaaagatagtccgtaagtataaacgtaagaagcggtttgggaagtctgtgaacgaccgcagtccgggcctgttccagaccaggctgaaacagaaatgtgtccagtatggacttgcctatatggaaactgataaatggaagtaccgtgcaagccagtatgaccatggcctggatgcgtatatcaaagtagagctttccagacggtttaagaccgtagcagggcaggtcgtacagagggacctctacagtgcgttcctccagtcctgcatgggcaccccggaaaaaccggacagggaaaaatgcctgcagctgttcggacagtttgtaaagatgcagacggaactgatcatgaagatgaaggcctccggacagtcacgtccggcatgctttggattctgataaacggcagatcctgccggaatatcccgtaaaccaccgtttcccagaaaacacgttgatccggccacagggggcagaaaccactccttcggttgcaagtacaggacacaggcctctggtctgtgacccctcgaaagcttagtccgtaaactggaagagagtcatgcaaaactaagggacagaccatgcctggaagatcggccgtctgccgcccgggggctatacctgcaggggtccgcctgctgtagtgaagctcgggtcctcttcaagtgcttccctttcggggagtgcgggaatcccgcgactttagtcgtgtggaggtttcaaaacaaagatcctgcgatacaccgtatcttatagcgttttcttatattttccccgcatattgccggtttccgattcttaacatctgcttatgcgctgccggagtatttccaagatatatatatatcaatggattttccgctgatatcaccccagtatcctccgcggaatagacggcatccctgaacttcatttcctaacggggcagcaggtagatttactgcaacggcattgccacggagagctgactgccggcaatgattttgcggagcacgtaaaacaaaagctatattcctgttttgaaaaatcagataatagttgcgattaatcagattttgctatataattgattacagtcaaaagtgcaaacaatattgtgattggagaatgaaaatgccaaaaggattacagcataaaggaattgtcagaagaaacaaaatgctatatgcagcagtacagctttttttaaagaatggatatgaaaaaaccacaacagcttcgattgcaagagcagcaggaatggcaccatcatccttttttgcagcgtttgagaataaggaggcgttattactgacgttggtaaagaccatgtttagtagccagtttgaaaatacaggagttatattgggggagaatgccgacccattacttatttacggggtcgaaacatccctgcagatgtatatagcagaaatgtcagagccactgcgtgaattatacgtggtaggatatacgcttcccactacatcggaatacatttatcttagtacggcaaagaaactgcagtttatttttgcagaatacatgggaaccgcggagctgaaagattattatgaaatggacattgcctcggcaggaattaccaggggatttatggccaaaaagtgtgatatgtattttaccatggaagataaattaagaagatttctcaaatgctgtttcactttgtacaaggtgcctgaagaaaaacaggaggaagttatagaacaggttttaaagttagatttaaaatctatggccgaaaaaattattgctgatacagttaaaaaagcagaagaaggatttgagtcagtactaaatgatatataagtaacatttgtcttcggcttaagaagaagcagctgtctcacaggaaatcagaaaaacaggagaaacaattaaaaagcttgaatacggagggagaaagatgaaaaaaatcaaattcgcaaaaaagagcagaaaactattttccgcgatcctggcaggagcaatgcttaccacgtctgtgataccggaatcttttgtctgggcgtcagaggaagtgcaggaatttagagacagtgagagcctgggctttggattcacatcagatcctatgcccggggctggtggagatggggaaaatcaggcgctttctgattttcaggatatgccagatgttcaaaatggaaatgatacagtggatatggaaagtggatttacagacgagagtgattcttttggcagcaatggcagagattcttctgtaggatctgacttccagagcctggcatctgtagaagaactgcaggagcggatcaacgctattccaactgtggaagaatttcagaacctggcagatggtactacggtggaaggaagcaccttgaatcaggcacagacagatgtgtacgcagaagcccaggatattgcggaaaaactggagctgctttcggaagaagagcaggggctggtggatgtaagcaggctagaagcgctgtttggatattttaatgggatgacggaagaattggaaactacaactaatgtgattgatccggtgacatctggaagtgtaagcattacttctggaggaacatatacattaaacggtggtgcctacactacgcctgatagtgcaattattatagatacagaagaatcagttaccttgaatattgccggtaatattacggcatcaacacaaactcctccaaatactagagaagttacaccttttatcaagattgaaaagaattgtaagaaattagaaataattaataacggaaatttcgaggtgaaacttaacaatggtagtgtcagtcttttaaaggatagtagcaatgacggagtggatcaaattaattttacaggaggcacttacaaggcttcaacagataaggtgtctatgatttatttccagggaactatagaatttcaaaatgctgtttttaaagcaactgggtcaacacgagatagtggacacattgcatatagcactggaactagcactggaactgtgaaaattcataaaggaacacatatagatgccggaaattccagaatatccaatcaccaagatgcttgtattggtgcaaaaattgtacaaatggatggaggtactataaccggaaacgtcaaaaatggtcatattagcggaataaaagcaaataatgtgcagtttactgggggagtaatagaaaattgtgaagcggcaattctatatatggattcgaaacagatagaaggaataaagattggtgggaacgcaacttttaaaaataatgattctgatattaatcttttaaaaggacaggtatttacgatacaggatgactttaagggaaatgcaactgtatttttttggacagactgggattacacttggtaagattacgacttctgggatatcaaaatctatgcttggcaggattacttcgaagaatggtggttattctgtaaactacgctgaggatgataatggtggatacttgtttttatcgaaacatacgcatacttggagctattcatcatatgataataagattatcgcaaaatgtactgacgctaactgtaagaacgaattggagctttcactcacagcggcgaattctgattattcaggtgaagcatatgctggggcagaagtagaaaataatataagttatgttacaggtaaaaaggcagatatcgtatattatctggaagatggaaacaccacgacaaacgctgaaaacagtggtgctgcaagtgatggagctgctccggtatatgtaggaaattatgttataaaagtttcggttgaagatcagacgttaagtagtgcttttaaaatagaaaaggcaccggttactctaaataatttcagccttgaaggttgggaatatggacaggctgaacatacaccgcaggtaacggttaagtcagatgaaaaagacattacacagttatacaataaatctcagattacctacaaatattacacggataaaacatgtacaaaagaaacaaccaaagcaaatggtgcaggcacagacggagcagtaccaaagaatgcaggtacttattatgtaaaggcagctgtgccagaaatggataattataaagcgaacagtgcagtagtgggctttacaatcacaaagaaatccataaaggcaaccgtaagcgcagcggataaaacttacgatggaatcgattctgccactgtaaatgcaacagtggatcagagtgaactggtatccggtgatagcattaccattacaaaccttacaggtacttttgaagactggaatgctggatctaataaaaaagtaacagtacacagttcagcagattcgatttcaggaactggtgctgagaattacgatgtacaaattgcacaagagacaacagcctctataagtaagctggttgcaaagcttacatggagtaaaacagaccttacatacaccggcaccgcacagagcgtgacggcgacagttacaaataaagtctccggcgatacttttaacattacttatgatggaaatacacagacagaggcaggagataactatacggcaacggtaacagatcttggaaatgataactacacacttgagggtgcaaccgatattttccaaaaatggagcatcagatatctgcagacttcaacggctgcacaggtttccggaacgaaaggtaagaatgactggtacgtaagtgcagtgaagcttgtaccggacagtggataccagatatcgacagacaaaacaaactggaaggattcgattggggattacacggatcagggagaacattctgtaacctattatctgaaagatgcaaaggggcacattacagacaaaaaaacagcaaccttcaaaattgataccgaagtaccaacaggaaaaattgaaattggaacaaatacatttagcggttctccgaatcctgttgcttacgattactggttcaggaataatgccactgttgatatcacaggagcagattctaccagtggaattgcctcaatagaataccaaaaggtgaaggcagatgaatcctatgatgtaaatggcacatggattacatgggatgcggctaataaactttccctgacagaaagcggcaagtatgtgatctatgcgcgtattactgacaatgcaggaaatcagaccatcatcaattcagatggagtggttgtatttaaagattctgtagttgtggattcttccatcgactacacaaaaacaaccaaaacttccgtggacgcgaaggtaacattaaatggaaacaccgtagcgtctgtaaaaaatggggagaacattttaacagcaggaacggattatacagtttccgcagataaaatcacgttcagcggagaatatcttgatactttggcggttggaacttatacactgactgctgcatatcatccgcagggagaaatacagtatacaggcggtgacaaacctgctgaaagccagatcgcgttaaaggtaaaacagaagacagtaaatgtaacataccagacagcaaatgtaaaaatcacaagtgttttggataaagagtatgacggacagcctgcagatctggtgtatacaacaaacagcactgccagtgtcaaagttgagtacaacgtaaatggaatctggcagacaaaagcaccaacatatgccggtacttatgaagtgaaggtcagtgtacctggaaacagttattttaccgctgcttcaacaacaaagacctataccattaagccaagaggagtggagatctccggaattaccgcaaataagaaggtatatgatggaactaaggatgcagaattggattacagcaaagttgtgtttgcaaggttgattgaaggagatgcccttacggtaagtgcagaaggtacatttgctgacagtaatgcagcaaaagggaaaacagttacgatcacaaacctggtactgggaggcaaatcggcaagtaactacgtcctgaccgctgacggacagcaggcaggtaccatagcggatatcaatcccaaaagaataacggtaacagcggataatctgaagaagatcgttggcggggcagaccctgtccttacttacacagccagtggtctggtaggagaggataccctgtccggaattgtcgtgaaacgaaaagcgggggagaaggtgggaacatatgcgatcaaagtttcccagaaaaaaggctcaaacccaaattacaggatcacatttaagaagggtatcttcacgatccagcaggccgaccagtctaaactgaaaggaaaggatatttatcgcctgaaacttccggtattctttgcaaaaggaaaagccaataagaacagcattaccctttcctggaagaaatatgccggtgcaacaggatacgatgtttactggagttattgtgacggcagaataaactataaaaaggttggaactgtcaaaagcggaaaactttccatgtcccataagaagctgaagaaagaccatgaatataagtactttattgcagcttataagatggtggaaggaagaaaaatctatattgccagatccaatgacgtgcatgttgccctgaaacaggcttccacaacaaacgcagcttccatcaaagtaaaccggacggagattaccttatcagttggaaaaactttccagttaaaatgcagtctcaaagccgaagacaacaggaaagatctggtttcccataccagtcccttccgttattacaccactaacagcaaagtggcaacggtaaacaaagacggcgtgatcaaggcaaaaggcaaaggagtctgcactatatacatattggccaacaacggagtgtacaaaaaagtgacggtaacagtaaaatgagaagaatgtcagaaagcagattcgcagaatattaagttcctcaaaaacacttcctcaaacagaaataatatttaaccaaaaacctctcttgtaaagcaggagaggttttttcgtatcagaattaaatttttcttttccattgtagaatcagcacatcaaaagtctgtcaccttctgaccgtttttctctttattttgtctccgcggaaaccaatccttaatttttctgcaagccaaatgattaacataatatttttacggtaaccttaataagatttcttatcctacaatattgtctgtggcttctgctatgccgcggaattttatcagtttttagtcaatttttaaacaatgacagaggataatgctgttttgtcttacaaaaaagtgaattcgaattcacttttttcaggtgatccagcagggtacctgtaaaacagatttgtcatattgtgtttgaatatcctgggatctgaagacgtggaaatgatattaaaaagagcagagactttgtagcacaaaaaccccaccgcttagcaggcagtggggttttcttaagacagcttatactctttggggatggtttttccgtttcctttcatgtatggtttaatatagactgtctttccagtcttatagtgtctgcaatgtccgcggacgcaccaggtttccgtcagtctctggcgggttttgctgcggagtctcctcgtcagtttttcatttgaggaaaggacccggatgccgttaagcgaaatgacacgtggggatttcctggccggttgcttatccgcggaaatctttttcctgcttttccctacgtctgctttattttccatttccttatgacggaagatatttttacctctgaagtggaacggtttgttgccggaagaaaggtatccctgatctgggcatcaccggactgcacccatttcagcaaagcgaaaggaaagactccaaggaaacaggggatacggatgctcccgtatgcggtatatttccatgcagcacagattcatccggaagtgatctgtatggagaacgtggcagagatccagggctggtgtccgatcgaggacagggaagatgtttccggttttggacagccgggaactttgcgccgcagactacggtgccccgaccacaagaaagcgctggtatgcagtgatccgaaacgatcaccgtgcgatacgatggccaaaacccaccaacagcaaaatggacagttttcttttgcataaggcagcttcggctgtctttttttcgtattttccgtatcagaatttaattacgctgcatatatattttgtatgatccatacttttggacttttcgtataactgttcatagtttataataattcttagataaatacaaaagcgaaagcattagatcgtcgcattgtcgcgtttaatgatgaagtgggcatattctattttattcacttgaaaatatggtggaatgggattgttttgcctaaaactgcggcatttttgattaaaacaatatccaaaagcatcgaaacaagcgttttcggtggctgatggatgactttattcaatgacctcgcattattcctattgtatgttaagctttgtggtactatactgaatgtataaaaaatgaaggaggagcttctcatgaagaaaaactttaagaaattattggcattaactctcgtatttatcatggtgctcataccggtgcaggtatctgccaaaactcttatcccggaaagagtaatttatcttcctgtccataccggagtagtggaaaatataggattttatccaccggataaaaagcccaagatcaccctgtcaaacaaaaaaattggaacaataaaaaaaagtgttaatgatatagggtttatcagtttcgattttgttcccaaaaaagctggaaaaacgcttgttactatgaaaataaccgaaggaacatctaagttctattttaaagttgtgaattacaaaaacccggtttcttccataaaacttggaaaaacaaccattaaaggaaataaattcaataaaacagacaaactttctctcagttacagcaaatatgctaagcagagtaattcgcttaaaatcgtaccaaaaaaaggctggcgcgtaagaggcttctattctttggataaaaaaggagaaacaacttattattccggaaataagttcaaaccgatcggaggaaagggaaattgcacccttcgtattgtcttcgcatcagtaaatgttaacgcacaaacctatattgatattgattttaaataatcattggcaagacataactttgattgaaaaacatagttaaaaaaggagatccatcccttcggcatgagtctccttttttcatgacattatttaaaccagagcaaaacccgttcctgttgtcctgtcttttcattaactacgtcagcacagatcttaaaatccgtgccgttgatcggaatggtagatccattgtttacatcttcagatttgaaccagcttttttccatataggaaaggccctgtttcttcatataccaccccttttttaatttaaaagttacttttaccttcttttttgcaaatttggaatatgggattactcgatatgcttctttatcaaaacgttttccggaaatagatgtatttccgatcttcactgaaacaacaggatttgtatattttcttacagtaagagtacatttgcggattttgttcccaccttttgctgtaataacagtttttcctgtctttttgggggttacatttatagaggaataatcaaacgatgcttctgcgacagatggattgctgcttcttatggaagttacattttcagctgtttttgtaaaaaacccgatccacggatttgtaaaaaaataatttactgaaggatttttcactgtccttccagtatacaatgtcacggtttttctacctccaaaatactctggcactccagcttgcaccggaaccgctgataaaaccaaaataacaatcagtgaaaatgttaaaatctgtttccatatttttttcatttttctctttcctttctgtatatgtatttgcaaatactagataacttagtattatactcgcagtcacaagaaattcaaagttttatgcaaacaactcgttgttctttttctgacaaaatacacatatctgtgtcttaccatacaaacatgtggtataataaagacagcaaaatacagaaaggaaaaagccatgggaaatgaagcaggggaatggatcattcatggagtaacatgggatgatccaaaatgcatccacgatgtggatgaagcagtcgaatatatcaaccgggttggttttcttcctctttttaagaacgaaattccggggttttctctggaggaacggacagtggcagaatattggtggtctgatgatccggtgagggatccgtggagatggaggattgctattgcaaaaaagcatgatgttctttacgggaaattttttgccaaaaaagccgggtttatttccaaaaaatggctgccggtatttgccaactaccgcagggacggctatgattttgatgctctgtttgaggatgaaaaagcaccgatcaaacataagaatattatggatcattttatggaaaatgatgcagaaatctactcctacgaattgaaaaaattggctggatttggaaaagatggcgaaaagggatttgacggagccattaccagccttatgatgcagacatatctgtgtaactgcgactttcggaaaaggatcaatcaaaaaggcgtggagtacggctgggatgtggctgtgtattcttctccggaacacatttatggatatgaccatgttacttcctgttataaggaagatccgcggacatcctgggggaaaattgttgatcatatgaagcagctttatccagaagccgcggatatgcagataaaaaaaattctaaaataggagagaatatgtgcagcagatattatatagatcccgatatgatggaggagatttccagagtggtacagaacatagatgggaggatccggctgacacaaggagatatccgtccgaccgatgtcgcaccggtcattggacagtcagaacatggactggaactgggtatatgcagatgaggatatcccctgtcaaaaggcaaaaatccggtcatcaatgcaagggtggaaaccgtcatggataaaccttcctttcagaacggaatcttatatcaccggctgttgattccggcaggcgggttctacgaatggaattccctgaaagaaaagagtacctttaccagaccggattcctctgtgctgtatatggcaggattctgtgactggtttgagaatgaacgaagatttgtgatcctgactaccacagcgaatgattccatgaaaaaaatccatgatcgcatgcctttgatcttggaaagggaacaaattgcagattggtttgataataacaaaatgcctgtacttctgcaccaggcaccgactctgcttaatcgacagacggaatatgaacagcagagtctgttttcatagaaagtggtgagttttaatgacaaaggatgaatggtacaagcaactgttcgagagacttggaaactccagattttggagcagatttcatcttaagcagaatgatattgattatattcatgaaaaaggactggatacgatccggaaacacgcagaggatttcattacaaaacgggaggctcctgcatatatcccaaatgatggaaaacagacacccatgcgcggtcacccggtattcatcgcacagcatgctatattgtatattacaaagaagctggaaacagtaaatggattaagttaaaaacgcttggtagtaccaagtccagctacacccatacatcttctaagaagcatccaattatcgttggacagaaatatcaatatactgtcaaagcgtacaatagggatacgaagaagtatggaagctacaatacaaaagggctgactgtaacagcatcattaaagatggtaaccggtattgaagccaaaatcgagggaacaacagttaaacttacatggaacaaagtaagcggtgcggacaaatatgccatttcttcaaaaatcaaggcaggcgacaaatggagcaagattgtcacagtcaaagacacctcatctttcgttgacgtaaatccatgtgtagactgcacaaactattattctgtaaggggttattccagcagcactaagacatatggagttatgaataaaacaggagtaagcatttatgtgaaagacagcgacgaagttagaccaacaataacgccagggccaacagatactcctgacccagatgatgaagttgaccatgctacaccagaacagaaagcacaggaagtatcaagcttgtaaatacagaaagaatgaaagctggtttacagccgtacaagtatgatttaagacttgaaaaggccgcgatggtaagggctaaagagattgcggttaagttttcgcatataaggccggatggaagaaattctagcactgctgtttcagaagctggcgtcggatgtccatcaggggaaaatattggtatgggtacatcaagcgcaccagaaatatttcctactccaaaccgtaatggatataaatttgatggatgggctactgaatatggagaaaaataccactatatgacagcagctagaaatgaaaaatttaccgcaacttggatttctgataactaaaagagataagacaaataaacagaatcatctgctcatttcgtatgacgacaaaccagaacctgcagatgactccgagtggggaaaggagtatgctcgtaccctccagcacttcgaaatccttaaggcaaaactaaatgtatccagagagcatgctatcgatacctttgatcggctgacagaaagcgacacgaaaattctggataaaatgtaccatctacatgagctcaaccggatcatgctggaacataatctggataccgtagtgatcctgggacatctgaacccggacggtgacgctgccggttcagttcggaaaactttacagtattatgatagaagactgtgcaaagccgggagaagaggtacaggaacttataaatatctttcagtcttttataagtgatgctatctcgaattttaattcggatctgtattatcagaaccctgactatctggagtggtcgtatcgtgaaggggagcttttggattaatgcctgaaacgcattaaaattggttccgcagtatcatcaattgaatgttactgtggaacctttttatattcatctgctattttagccgggtaagtcggattttatctgcgtatccctgacagttcgtcttctatccacttatctgtgttgaagttactgtcaaagaacctgacgattacgccgtaaggttctgtatcactgttgaatgcgttggcttcatcagtgtctacgtgcattgccaggtgataatttctgtggactctgactactacatctgcgtagataagtgcgcgtccgtagcttttggtcaggacgaagacttcgtcattgtctttgatatgcagggcaagtgcttcatccggagtcatgtggatgtggcgtttggctacgatgacccctttggggatttcgatatcaccgcatggaccggataaaatacagccgggagttccttcgatatcaccggactggcgtattacgcttggaatccccagttttctggtgtctgtaagggacatttctacctgcgtgtcgctgcggaaaggaccgagaagtgccatgttttcgaaagtacctttcggtcctttgacagttactcgttcccggcacagatattgtccgggctggcttaattctttgataaaatgtggtttgcttccctctccgaataatttttcaaaatcttcctgcgagatatgcagatgtctggcagaagtttctataggtattttgatgctcatttattacaatactccctcaatatgttacttgtatatgtctgtctgacatcctgttgtctgatgggatacagagcaattatacttactttttagtgtatctctttaattggaaatatgcaatgtttatcttgtaagaaggacaatttttattataaaatagtgttaacttacttttatcggtttacaaggagaagtgttctgggctataataagatacattagaataacagttactgtgagcggagtgaacagtaacgaataacaattctaaatgtgacaaaacagaatgaaatagtaatgtaatatcagacttatagaataataaccaagaaggattattgaatgagcaaaaagagattttccgggctgcgtctgattcttatggtacctgtggtggtgcttctggccggtggactgatcatcggcggaagagctttgcaggaaccgggggaagtaaggactcttaagagacaggaggtagcgcagacggatgaaggacatcaggagtattatttcggccttcttaatgagaatgaacagagaggctaccgcgagatcctggaggggatcagaagctttgaggataaattttatctgtctctctcaggagataatgagatagacagagtgtatcatgcagtgctgaaggatcatccggagctgttctgggtacataaccgggagaaagtttataagacgacttattcgggcagagattactgtcagttttctccgggatatacttatacagaggagcagagacaggagatcacgcaggctatggagaatgcgtatcaggaggtgttatcgcagattccggatggtgctgatgattacacgaaggtaatgactgtttatacttatgtcatagacaatacagaatatgtgatctctgatgatgaccagagtatagcaggagctttctggaagaaacaggcggtatgtgcgggctatgcgggagcagtgcagtatctgctggagcgtctggatatcccctgtatttatgtggagggtgatgctgcaaacagtacccagggacatgcctggaatattgtagagctgaacggacagtattattatgtggatgccaccaatggggatcagccggactttctggagggtgatgccacgctgctggcagagcataagacaacgatctatgattatctgtgtccgttcccacaggagtacgaggagaattatacggtctctgatgagtttcctgttcctgcgtgtacagcgactgacatgaatttctatgtgagaaacggcgcctgttttgatacctatgactggagcagtgtatatgacctgtgcagactgcgcattgacagtgatgctgcggtggtacgctttaagtttggcagccagggggcttatgatgaggcatatatggatctgatcgacagtaatcatatccaggatatcgcaaaatattatatggaagtccatgggctgtcacagatttcctatcattacggcgtgatcgacaatatgaagaccttatacttcatgttctgacgggtttagttcagatgtgtcagttgatgataaggaacgctataaatatataactaaaaggagtgactgaaaattatggttaatatgacagatatatttggaaatgcgctgagtattgccgggagttttatggattcagatttggtgaatcgttttatgatggtaatatttgcagtgatccttgtgtttggagtgctgaactgtattctgggatacaggcttctgcgtttctggatgatgctgggaggttttctggtaggcggcggtcttgcgctggtggttgtacatacaatgggaatacaggagaaatcaacaatgctgatcgcagcactggcggcaggagttgtgttcgcagtgattgcatttctgatctataaggcaggtgtgtttatcctggcagcaggtatcggctgggcggccagtatttatttcctgcatcctaccagctccgcagtattttttgcatgtattctgatcggcgtagctcttggttccatggcggtgaaatactgcagggaagtgctgatcgtggctacaagtctgatcggtggtattatggcaggagtttcccttgcacagcttggaaatctggcagatattccctatggactgggaatgagtgtgggatttgcagttctgggtatgctgattcagtttgctatcaacaaaccggtttctgatgaagaggatgaagaaacggttgatgaagaaagcactgagcagatttacaggcgaaatcagaacctgagacaagaccagagttttgagcagtctcaggacagagacatggaggaatcaatatatgccagaggacagaaaggacaggcgagaaaaaatggcaaaagaagctaagacaaatgcaatgagaatgctggacagacagaaggttaaatatgaggcgttctcctatgaatgtgatgaatttattgacggggtccacagtgcggataagattggagcaccctatgaccagtcttttaagactctggtaatggaaggaaagagcggcggctatttcgtttttgtagttccgattgaaaaggaagttgaccgtaaggcggctgcaaaggctgtcggtgagaagacagtggacatgatccatgtgaaggatatcacaaagattaccggatatgtgagaggcggctgcagcccgctgggaatgaagaaaccttatcctgttgtgtttgatgcatctgcaggagaatttgaagagatttatgtgagtggcggccgtatcggactgacactgaaggttccccttgctgatctgcttaaggtgacaggcggaaagctggcggatattatcatgaagacagaataaaataacagggtacggctaagccgtaccctgtattttattctttagttatcggaagcgtcctcttcgttgatctcgaatacgtgacgtttcttagccatctcatcacttgccagatattcatcgtaagtagtgatcttgtcgatcatggttccgtttggaaggatttccatgatacggttggctgttgtctgtacgaactgatggtcatgtgaggtgaaaaggataacacccgggaatttgatcagaccgttgttcagtgctgtgatgctctccatatcgaggtggttggttggctcatccaggatcaggatatttgcaccggagatcatcatcttggaaagaagacagcggactttctcaccaccggaaagaacgcgtacacgtttgatgccgtcttcaccggggaagagcatacgtccgaggaatccacgaacataagtagcatccttgatctcggaatactgtgtcagccagtctgtaatagtaaggtcattatcgaactctgcagtgttgtccttagggaaatatgcctgggaagtggtaacaccccatttataatttccttcatccggttccatttcaccaactaagatcttgaacagagtagtgattgcctgttcgttggcaccgacgaaagctaccttgtcatcatgtccgagtgtgaaagaaatgttatccagaacttttacaccgtcgatggtcttggaaaggttctccaccataaggacttcgttaccgatctcgcggtttggacggaagtcgatgtatgggtatttacggctggacggacgcatatcgtcaagctggatcttttccagggcacgtttacgggaagttgcctgtttggacttggaagcgttggcactgaatcgggaaataaattcctgaagttctttgatcttctcttcttttttcttgttggcttccttcatctgtttgatgaggagctggctggactcaaaccagaagtcgtagtttccggcatagagctgaatcttgccatagtcgatgtctgctgtatgagtacatactttatttaagaagtaacggtcatgggatacaacgatgacagtgttgtcaaagttgatcaggaattcttcgagccattcaatagcgggcaggtcaaggtggttggtaggctcatccagaagaagaatgtccggattaccaaacagtgcctgcgccagaagaactttgaccttctggcttcctgtaaggtcagccatctgggaatagtggagatcggtttcaattccaagaccattcagaagagtagcagcatcagattctgcttcccatccgttcatctctgcaaattcaccttccagttcactggcacggataccgtcttcatcagtgaagtccgcttttgcatagatagcatctttttctttcatgatctcatacagtctcttgttacccatgataacagtatccagaactgtatatgcatcatatttgaagtgatcctgctgcaggaaagaaagacgctggcccggagtgataacaacgtcaccgttggtaggctctaactgtccggaaaggattttaaggaatgtggacttaccggcaccgtttgcaccgatgagaccgtagcagttgccctcagtaaatttgatatttacatcttcgaagagggcctttttacctacgcgcaatgtaatattgtttgctgaaatcatatcatacctctttttcgtgaaattattgttttgcagtaactgtccggcagattgtttatggaaaacgtatctttcgcaggaaacagttacattatttcctattatataagttacaaccgtttatcattgtaccgtaaattgggaaatttgcaactgttttttgcttttttgggttcttttatttacaaaaaaaagaagcactgttataatatagaataatatagcctcttgacggacagaaatatgaggcattgatatgacagaaataacgattactgtttccattgttttatgcaaaacagcgatgtggacagtaaaggataattaattttagagaggttgcaaagactatgtttattacaagagagtgcgattatgcagttcgagtggtacgtgcgctttggggagagagcagactgagcgtatccgatatctgtgagaaagaagcaatcacagctccttttgcctataagatcctgaagaaacttcagaaggcagagatcgtgaagggatacagaggcgtacatggtggttattctctgaacaggggactggatgagctgactttatatgaggtttattcggcgattgatccggatatgtttatcatcgaatgtctggatccgaaatataactgtgtcagagacggacaggatggattgccatgtctggtacatagagaattgttatctgtacaggatgaactgataagtctccttaagagaaaaacaatacagcagatcatggaggaggcgtagagcctcctttttttacttttatctgcctgatttgtccgaaatttggcatatctgcataatgttagttatatgcaactcgaaaaatgcacatatttgctactgaaataacagaaaatctctgctttgtacctcagaagatacaaaatatgtcaaaacaaattggacacaggcagaagattatgttataatctacaatgaaatttgaggtatattttacttatgccttgaaataaataattaattttttcatcaacctttaaggaggaaaaacaaactatggcaagaaagatgaaaaccatggatggtaaccatgcagctgctcatgcttcatatgcatactcagatgtagccgctatttacccgatcactccttcatctgttatggcggaagcaacagatgaatgggcaacccagggaagaaagaacattttcggacaggaagttcaggtaactgaaatgcagtctgaggctggtgcagcaggtgctgtacacggatctctggcagcaggtgctttaacaacaacatatacagcatctcagggtctgttacttatgatcccgaacctttacaaaattgccggtgagcagttacctgcagtattcaacgtatctgcacgtgcacttgcttcccacgcactttcaatcttcggtgatcactccgacgttatggcctgtcgtcagaccggatgcgcaatgctctgcgaatcttctgtacaggaagttatggacttaacacctgttgctcacctttcagcaatcaaaggtaaagttccgttcatcaacttcttcgacggattccgtacatctcacgagatccagaagatcgagacatgggattatgaagatctgaaggatatggcagatatggatgcaatcgctgcattccgtaaccatgccctgaatccgaatcacccatgtcagagaggttctgctcagaaccctgatatcttcttccaggcaagagaagcatgtaacccatactacgatgctcttccggcagtagtacaggaatacatggataaagttaacgctaagatcggtacagattacaaattattcaactactacggagctgctgatgcagaacatgtaatcgttgctatgggatctgtaaacgatacaatcgaagaaacaatcgattatcttgcagcagcaggaaagaaagtcggtgttgttaaagttcgtctttacagaccattctgtgcacaggcactcatcgatgcaattccggattctgtaaaacagatcacagttcttgacagaactaaagagccgggtgcacttggcgagccactgtaccttgacgttgtagcagcattaaaagacagcaaattcggcggcgtaaaagtattctccggacgttatggtttaggttccaaagatactacacctgcacagatcgtagctgtttatgagaacactgctaaagagaaattcacaatcggtatcgttgatgatgttactaacctttcccttgagacaggtgctccgatcgtaacaactcctgaaggaacaacaaactgtaaattctggggtctgggagctgatggtacagtaggtgccaacaagaactccatcaagatcatcggtgacaacacagacatgtacgcacaggcttactttgattatgactccaagaagtccggtggtgttacaatgtcccacttacgtttcggtaaaaaaccgatcaaatccacatacctgatccacaaagcaaacttcgtagcatgccataatccatcctacgtaaacaaatacaatatggttcaggaacttgttgacggtggtacattcctccttaactgtgcatgggatatggaaggtcttgagaaacatttaccaggacaggtaaaagctttcatcgctaaccacaatatcaaattctacacaatcgacggtgttaagatcggtattgaaactggcatgggaccaacacgtatcaacacaatccttcagtctgcattcttcaaacttacaggaatcattccggaagagcaggcaatcgaccttatgaaagctgctgctaaggcaacatacggacgtaagggtgatgatgtggtacagaagaactgggcagctatcgatgccggtgctaaacaggttgttgagatccaggttccggaaagctggaaagatgctgaggacgaaggccttcatatgactcatgcaacagaaggacgtcaggacgttgttgatttcgttaacaatatccaggctaaagtaaatgctcaggaaggtaactccttacctgtatctgcattcaaggattatgtagacggtactacaccatcaggtgcagctgcatatgagaaacgtggtatcgcagttaacgttcctgtatggaatccagaaaactgtatccagtgtaacagatgtgcttatgtctgcccacacgcagttatccgtcctgtagctctgacagctgaagaagcagctaatgctcctgaaggcatgaagacattagaccttacaggtatgaaagaatataaattcacaatgtccgtatccgcacttgactgtacaggatgtggttcttgtgtaaacgtttgtccaggtaagaagggtgcgaaagcacttgctatggaaaaccttgaagcaagcgcagacgagcagaaatactttgactacacagtgaaactgccggttaaagaagatgttatcgctaaatttaaagaagcaactgttaaaggcagccagttcaaacagcctctgcttgagttctctggagcttgtgcaggatgtggtgaaacaccatacgctaaactgatcactcagctgttcggtgacagaatgtacatcgcaaacgcaacaggatgttcttctatctggggtaactcctcaccatctacaccatacacagtaaacgctaagggacagggtcctgcatggtccaactctctgttcgaagataacgctgagtttggttatggtatgcttcttgctcagagagctatccgcgatggcttaaaagcaaaagttgaagacgttgttgctaacggaacaaacgaagacgttaaggcagctggtcaggaatggctggatacatttgctgtaggtgctacaaacggcgctgctacagacaaacttgttgctgctcttgaagcttgcggatgtgacaaagcaaaagaaatccttgctcagaaagatttcctggctaagaaatcccagtggatcttcggtggtgacggatgggcttatgatatcggattcggtggtgttgaccatgttcttgctagtggacgtgatatcaacgttatggtattcgatacagaagtttattctaacacaggtggacagtcttccaagtctacacctacaggtgctatcgctcagttcgctgcaggcggtaaagagactaagaagaaagatatggcttccatcgctatgagctatggctatgtatatgttgctcagatttccatgggtgctgacttcaaccagactgtaaaagctattgcagaggctgaggcttatccgggaccatctctgatcattgcttatgctccatgtatcaaccatggtattaagaaaggtatggcaaaagctcagacagaggaagaattagcagttaaggttggatactggcataacttcagattcaatcctgcagctgaaggaaacaagttctctcttgattccaaggctccgagcatggaagattatcaggcattccttgacggtgaggttcgttacaactctctgaaacgtcagaatcctgagaaggctgcaagactgtttgctaagaatgaggctgaggctaaggctagatttgaatatctgcagaagctgatcgctcttcatagcgctgaataatcttttcggtttttgaacgactgtaaacaagtttataaatcattaaaaaataaatagatagagctatttatagtgtccagacgatatatgtgggccgcggtactttttgtatcgcggtccttttatgtattgcttaaaaaggggacgccggggaatggcagaacatctgaggctcagtctcggaaccatgtaatttctaagtatttgaaaaaccgctaaaaacattcagaaattgctcaaactcgcttcgctcaaacagtgagcaatttctgaataacgcggctttccaaatactaagaaattacatgaaccctcgagattcgcctcagatgttctgtcattccccggctggttgttggctgatttaaatactttcgtcgttcttaaacaatgaaataatgttggctataaatttgacaagtattggatatttgtctataatcagtgagaactttataactcggtttagaatgatagaatataaaggagcggttatgaggaaatttgtgagcagggatagtaagaaggatttctacttattatatacgcttgtatttggggttatttctttttttatctattatcagtttgcgggtaatgggaagtctttggtgtggagtcatgatgggattccgcagcatttgaattctctggcgtattatgggcggtatctgagggaggttctgcatacgatttttgtagagcataagctggaattgcctatgtgggatatgaatatcgggtatggttcagatattcttacaactttgcattattatgtgatcggggatccgctgactttgttgtctgtgtttgtgccggcggataagacggaggttttgtatgaggttctgatttttctgaggatctatctggcagggatttcttttagtgttttttgtttttatcataagaatccgaagcaggcgacgtttatgggaacgttgatctatatttttgcgggatggacgatttatgcggctatgaagcatccgtatttttccaatcctatgatttatctgccactggttctgatggggattgataagatttataagagggagaagccatggctgtttatctgggcgactgcggtttcggctatgtcgaatttctatttcttttatatgatctgtatttttatgtttatttatgcggctttccggtattttgggattttcagtgagagaagtgtgaaggatgttctgagatggctggtgaagtttatcggctattatgtggtggctttgatgatcgcggcggttatttttattccggtggtcatgacgatttttggtacggataggtttcaggctgagaattatgtgcctcttttatatgataaaatttattatgagaagtatctgggtgatctgatcggggagaatatgatccagtggggggttgccgggtattctgctgttgctatggcaggtgtgtttgtgcttttttccaggaagaagaagtacctggatctgaaattaggatttgggctgttgaatctgtttttgctggtgccttttgcagggcatgtgctcaatggtttctcttatgtgtccaacaggtggatctgggcttatgggatgatgatcgcgtatatttttgtgaaggcatatcctgagctgtttactctgactgtgagggaaaagaagaagatttttgtcatgacggtggcgtattgtgtgctggctctgtttgcgaaagctgccagaacgcagagaaatatggcaggtgtgctggttctggtattggctgtgtttacggttacttcttttggaaatatttttctgcaggggaagtatatgtgtgggcttctcagtgctttgcttgtggtgagcattatgttgaatgtttcttatcagtattcttatgagaaggattatctgtcagagtttgcagccgaagaggagtcgctggataagctggagtcgaatacggataaggcggttcttgctgccggggattcaggtgtctatcgttatgaccagtatggggcattgccctatgataatacttctatgtatatgggtacgaacagtactgcttattatttcagtcttgcaaacagcagtatcagtgattttttcagtgaaatgtatctgaatacgccatgggagcagcattatgagaacctggacggaaggacgattctggacaggctggcttctgtgaaatattttgtgataagtggtgataatttccgctatctttcctatggatataataaagagaagggctctgcaggaaagggaaaaagtgagtgcagggcttatgagaatgagaatgcactgcctctgggttatacttatgacaattatattcctgaatcggaatatgagaaaatggatgtggtaaaaaagcagcaggctttgatggacggtgtggtgcttgaggagagtacactgcctgaggcatctgttgatgctgataatgagaatatccagtatcgtatggagacaggggatggttgtgctctgtctaagggagcaatcagggtgacgaaggaaggggcgcagctgaagcttgtgttccatggtcttacggacagtgagaattacctgatcgcagataatctggattatgacagtctttcaccgagagaactgattggtaacagtcagtggaagaagatgtctgagtatgaccaaaataaggttcttgatgaggacagccggtggcgatactggaaggaatcaaaggaagcggctatgacagtcagctccaatgatgtgaccaagaccataaagatttttacggataagtataatgcctacagtggacggcatgattttctctgcaatatgggatattccagatcaggggttcgtactatgacgatcacctttgccaatacaggtgtttatacctatgataaattaagagttgtgagccagccggtgcaggggattgaggaaaaaactgtgaagctgggtgaagaagctctcgagaatgtaaaaatgggaacgaatgagattacaggggatatcagtgtttccgaaaagaaagctcttgtgttgtctgttccgtacagtaagggatttacggcttatgtggacgggaaagaaacgaagcttcagaaggcgaataccatgtttatggctctggaactggaacctggttcacatgagatacgccttacatattgtacgccttatctgaaagcgggaatgcttctttctgttctggggctggttatatatgtaatgctggtgttcaggaagaaaaagtaatccaaattccattgttgcaggcagcctgaaataaatttgttagaatagacatttttgtaaatttgtgtataataaaatagaaaatatttacaggaataacagacagtgaatgagaaattggtctgttgtaaatgaatgaaacaaaatgaggaatgacatcatgagtaaattatcagtggtacttccggcatataatgaggagctgatggttgggaaaacctgtcgggtgctggcggaagttcttacaaaagcgaagattccctatgagttggtggttgtaaacgatggttccggcgaccggacatgggaagagattcagaaggcaggagagagggatgcgaatgtgacaggcattcttttttccagaaatttcggaaaggaagcagcgattttcgcagggcttgcgcaggcctgtggagatgtggtggctgttatggactgtgacctgcagcatccgccgcagacacttattgagatgtacaggctgtggcaggaaggctatgaagtgatcgagggcgtgaaggcagacagaggaaaagagggctttttacataaagaatgtgcaggatttttctatgatatcatgtctaaggcaactaaggtgaatatgaaggatgcctcggattttaagatgatggacaggaaggctgtggacagtattctgtctatgcctgagaggaatatgttctttcgggctacctcttcctgggtgggatataagactaccagcgtggaatttgaggtgcaggagagagaggccggcgtttccaagtggtctccgtggtctttggtgaaatatgcgttcacaaatatagtggcatttactacttttccgctgcagtttgttacaatcacaggagcgatatgttttatctgttcgctggtacttatggtctattcgcttgtgcagtattttacaggttctgcagtggaaggttataccaccctgctgatggtgctgcttctggtgggaagcgccatgatgatcagtcttgggatcattggatattatatttccaagatttatgaagaagtaaagcgcagaccgagatatattatttcaaaagtaattaagaatggaaatatacaggactgagaggatatattttatgaagcaatggatcagaaaaatgtatgaaagttccgttatccgctatattttctttggcggatgtaccactatggtaaatctggtcagctttttcattctcagaaagctgaaggtggagctgaatatcgccaatattatttcaatcatcctggcgatcctgtttgcctatgtggtaaattcgaagtatgtttttcaggataaatgcgagacattgaaggatcatgttcagccattctgcaaatttgtcagtgccagactggtcactatggtgatcgaggttggcggtgtatggctgcttgtgtcagtgatggggcttaatgatatgatcgggaaattcctgacacagtttattgtgttgatactgaattatgtattcagtaaattttttgtgtttacaacagggaaatcaaaataatgaaggaaaagagagggaaaactcatgactctggaagaagctattgcaaagattaagccattagatcacaatgccatggagattgcacagaaaagatgggacagtattgcaaaaccactgcattctcttggaaaactggagactcttttgatccagatcgcgggaattacaggaaacgcagaggtggatctttccaggagaggtctgatcgccatgtgcgcggataatggcgtggtagaagagggtgtgacacagaccggacaggaagttactgccatcgttgccgagaattttctgaaatatgacacatctgtcggtgtgatgtgtaagcagaaccatgcggagatttttccggtggatatggggatggtgacggacacaaaagtccgcacagaccataaaattgcctatggtacacagaatatgaccaagggtcctgccatgacaagagaacaggctgtaaaggggcttgaagcaggcattgacatggtaagggaactgaatgataagggctaccggattctggcaacaggggaaatgggaatcggaaatacaaccaccagcagtgcagttgcttctgtgttgctgaaacagccggtggaagagatgacagggcgcggcgcaggtctgaccagcgagggacttatgcgcaagatcaatgcgatcaaaaaagccattgcattaaatgaaccagatcctgaggatgctattgatgttctggcaaaggtaggcggtcttgatatcgctggaatggcaggtgtctttctgggaggtgcggtttatggtattcctgtagtcatggacggatttatttcctgtgtttctgcgctgatcgccatgcgtatctgcccggctgcgagggattatattcttgcatcccatgtatcaaaagagcctgctgcccatctgatccttgagaatatggggaaagaggcaatcattcatgcggatatgtgtctgggcgagggaaccggagcagtagctttattcccgatccttgatctggcaacagctgtttatcattctatgagtacttttgatgatatccatgtggaacagtatgaggagttgaaataatgctgacgcttgtgacaggggggagcgggagcggaaaatccgcttttgcggaagacagggtgctttctttcggagatgcacagaggatttacatagcgaccatgcacccttttgatgaagagagccataaaaggatcgagagacaccaaaagatgcgtgcaggaaaaggtttcgagacagttgagtgctatacagggctcaaaaatgtgaaactgcctgccggatgtgtggtgcttctggaatgcatgtcgaatctggtggcaaatgaaatgtttgaagagcagggagcccatgaccggacagtttcggaagttacaaaagggattgagaatctgctggaacaggctgctcatgtggtgatcgttacaaatgagattttttcagatgcggttgtgtttgatggagatatggattcttatctggaatatctgggaaaaatcaatcaggctgctgcgcagagagctgatgaagtggtggaagttgtatatgggataccagtctttcacaaatccacaaatacctgcagcaatctttgcaaataatatatttgacaggattgccataatatgaaaaagaggaattgatcaatgaaatctttatggaataattttaaggtggcatttgccatgttttctaagattcccatgccccgcgctgactggacaaagggaaatatgaagtatatgttctgtttttttccgtttatcggaactgtgatcggcgggctgactatgctggtggcgtatctgggacttcggtttgggtatcagccgggattcgtgacagcagtgctggtgctggtacctgtatttgtgacaggcgggatccatgtggatggtcttttggatacttcggatgccctgagttcctggcaggagagaagcagaaggctggagattcttaaggattcccatgcaggtgcttttgccgttattactgcggcggtatatttcattgcctggtacggcgcttacagtcagttgtttaacagtgcagagaatatgagggcgatcggaattctgagccttggctttatggtttccagatgtctgtcagggatcggagttattacctttccgaaagcaaaggcagacggtacagttgctgagttttccagaaattcttcagatgtgctctcgagaaatgtgctgatcgtctatctggtgcttctggctgcgggaatgatcttgatccggcctgtatggggaagtctggcttttgtgggagctttgctgattttctggtattatcatcatattgcgatgaagtactttggcgggacaaccggggatatttcgggattttttctttgtatctgtgaagttgggatggcattgatcctggcggtggtttctaatttttgaggagaagagtatggaaatgataatcggcggtgcatatcagggaaagactgaatatgccaagaaacagtatccacagttaaggtggagtgacggcggttctgtcacagaggaggaactgatgaatgctcagggtgtgactggttttcagcagtatatccgcagtgaactggagaatggaaaagatgtgtcagatcttgcggaaaaaatcatctgtaagaatccggatattgtccttgtctctcaggaagtagggtacggggttgtacctgtggatgcttttgacagaaaatacagagaggctgtagggcgtgtatgtacgaagctggcagcatacagccataaagtgacgcgcgtgatctgcgggatcggaacggtgatcaaagatgattaagttatggctgatcagacatggaaaaacagaagggaataaactttccagatatatcggcacaacggatgagccgttatgtcaggagggaacagagtttctgcataagatggattatccaaaggttcaggcggtttatgtaagtcctctgaaacgatgcgtgcagacagcagagattctttttccgggagagccggtacatattattgaagagctggcagaatgtgatttcggagagtttgaaaataagaactataaagagctggaaggtaatccgcactatcaggaatggattgacagcaacggtactctgccttttccgggaggagaaagcagggaagggtttaaaagcagaaacctgagaggatttgacagggttgtgtccggatgtatccgcagccatgtggcagaggcggcacttgtcatccatggcggtacgatcatgaatatcatggaagagtatgcagatatacagaaaccattttatgagtggcatgtgagaaatggcggcggctatgaggtggagctggatgagaatctctggaagaatggacgaaaacagctcagggttaattctgcgattatgaaaggataactctcctatcttacaaaaattgttgacaaacctgaaaatttgtcataaaatcagcttcatcagaaaacaggaaaatcaaaaaaagaacgaggttgttcattgtcatcaatgactgccccgttctttttttatctgttcaccggagatagtataaaacctaaaaaaaatttgaaaaaccaaaaagtttttgtgaattctacttgcattattcggagaagtatgttacagtattagtacataattcctaaacgaaaggtaaaaagcagtatcgaattggtagtttttgacaagtgaaaggaggaactatatgctggtaattggtaatggaagaatgatcacacaggacgcatccaacccattcctggagaatggtgctgtagcaatggatggtaacaccatagtaatggtgggggtaactgaagaggtaaagaaagtttatccggatgctgaatttgttgatgcgaagggtggggttatcatgccggcatttattaatgcccatgagcatatctacagctccttcgcaagaggcttaagcattaacggatataatcctcagggatttctggatattctggatggcttatggtggacagttgaccgtcatctgacactggagcagacaaagctttctgcatatgctacatacattgattctatcaagaatggtgtaaccacagtgtttgaccaccatgcaagctttggccatattacaggttccctcaatgcgatcgaggaagctgcgaaggatttaggtgtgcgtacctgcctctgctatgagatttctgaccgtgacggaatggagaaatccagagaatctgtaatggagaacgtgaattttatcaagcatgcacttgcagacgacagtgatatgatcgccggaatgatgggtatgcatgcatcctttacaatctctgatgagacaatggctctctgcaatgaactaaaaccggaaggtgttggatatcacatccatgtagcagaaggcatttacgatctccatcagtgtctgaaagagcatggcaaacgtattgttgaccgtcttcatgactggaacatccttggaccgaagactttgctcggtcactgtatctatgtgaatgaacatgagatggatctgatcaaagatacagataccatggttgtacataacccggaatctaacatgggtaatgcatgcggatgtcctccaactatgagaatggtacagaagggaatcctcacaggtcttggtacagacggatatactcatgatatgatggaatcctggaaggttgcaaatgttttacacaaacacagcctctgcgacccgaacgcagcctggggagaagttccacagatgctttttgaaggaaatgcaaagattgcaaacagatactttaagaaacagctcggtgtcctgaaagagggtgcggcagcagacgtgatcgtgatcgattatgatccgctgacaccaatgaatgaaagcaacattaacggacatctgatgttcggtgtaaacggaagcatggtccagactactgtatgtaacggtaaagtcctgatgaaagaccgcgaagtccttgtatgcgacgaggcaaaagttatggcagattgccgtcaggctgcaaaagaacttgcagatgatattaatggttaatctgtaaagaattgtaaaaaagataagttttctgcctggcaaaaataaatgtaaataaaatatagaacggatggagagaagccataccgtatgaaataatggaggatcggattatgagtgaagtcatgacctgtatgccctttgaacagttaatgaactgggtattagaagaaaagaaaacaaaaggaacagttttcggacagcacagagcttatgcagcggaaactgacaggaagctgaatatatttgagagaaatctggaaacaccgatcggacctgctgcaggaccgcatacacagttaacacagaacattgttgcttcttactatgcaggcgcacgtttctttgagctgaaaacagttcagaagatggacggtgcagagcttgcagcctgtatcaacagaccatgtatccttgcagatgatgaaggatataactgtgaatggtctacagagctttatgttcctcaggcaatgggagaatatattaaagcatggtttatcctgcatgtgatcgccaaagaatttgatctgggtgcacaggacggattccagttcaatatttccgttggatatgatcttgcagggatcaaagagccaaaggttaatactttcattgacagtatgatggaagcaaaagatactgaaatctttaaagaatgtaaacagtggttattggacaatgtagataaatttgaaaaagttacaaaagaggatattgaggcgattccgtctgatatctgtaattccgcaacaatctctactctccatggatgtcctccaaacgagattgagagcattgcaaatcatctgtttaaagagaaacatctgaacacatttatcaaatgtaacccgactctcctgggatatgaatttgccagaaagaccatggatgacatgggatatgattatatggtattcggtgatttccatttcaaagatgacttacagtacgaagatgcgattccgatgtttaagagactgcaggcacttgcagatgaactgaaccttgcgtttggtgtgaagatcaccaatacattccctgtagatgttacaagaaatgaacttccaagcgaagaaatgtatatgtccggaaaatctcttttcccgttatccatttctcttgcagccagactttcccgggaatttgacggaaaactccgtatcgcttattcaggcggtgctgattactataatatcgaccgtatcgtcggatgtggtgtatggcctgtaacagtggcaactacacttctgaagccgggcggatatcagagatttacccagatggcagagaaagtaatggctgacggtgtgaaagaatggaaaggcattgatgtagctgcacttgagcagctggccgaggatgcgaaaaaagatgctcaccatgtaaagagcatcaaaccgcttcctaagagaaaaactgattcagaggttccgctccttgactgtttctttgctccatgcgaagaaggatgtccgatccaccaggatatcacaacctatgtgaagctggcaggagaaggcgattatgcacaggcattaagagttatccttgagaaaaatgcacttccatttatcacaggtactctctgtgcgcacaactgtatgtacaaatgtacacgtaacttctatgaagaacctgtaaatatccgcaacactaagctcatcgcagcacaaaacggatatgatacagtgatcggtgagatcaaagcaggcacagcagacggtaagaaagtagctgttgtaggtgcaggtcctgcaggtattgcttctgcatacttccttgcaagagcaggtgcttctgtaacagtatttgagaaagaagagaaagccggcggcgtgatccgttatgtgatcccgggattccgtatctctgatgatgcaatcgataaagatgtttccttcatccagaagatgggtgtggagatcaaaacaggtacagaagtgaaatccgtacaggaattaaaagcacagggttatgacgcagtgatcgttgcaacaggtgcaaataaaccgggtactctgaagcttgaaaagggtgaaaccatcaatgctctgaaattcttaagagatttcaaagcaactggcggtaaggttgcgctgggtaaaaacgtagttgtgatcggtggcggtaacactgccatggatactgcaagagctgcgaaacgtacagaaggtgtagaacatgtttacctggtatacagaagaaccaaacgctatatgccagcagcagaagatgagttactggaagtactggaagagggcgtagagttcaaagaacttctttctcctgtatctctggaaaacggcaaactgctctgtaagaagatggaacttggcagtatggatgcttccggacgtgcaggtgtaacagaaacgggcgaaacagaagaagttttggctgatacagtgatcgttgcagttggcgagaaagttccgactgagttctatgaagcaaatggtattgcggtcaatgagcgcggaaaagcccgcatcaatgataagacaatggagacaagtgcagaaggcgtttacgttgtcggtgacggtgcaaggggagctgctacgatcgtagaagcgatccgcgacgcacaggttgctgcaaaagcaatccttggacatgatattgtaaaaggacagcctgtaccgggaacagaaaaagactgttactccaaaaaagcaatactcaaagaaagcaaggacgctgcgagcgaaagtgagcgctgtctgacctgtaataaagtctgtgagaattgtgtagatgtatgtccaaacagagcaaacatctccatcaaagttccgggaatggcaatgaatcaggtgatccatgtagattatatgtgtaacgaatgcggcaactgcaagagcttctgtccatatgcaagtgcaccgtacaaggataaatttacattatttgcttctgaggcagatatggcagacagcacaaatgatggatttgcagtgatcaatccggagacaaaagagtgcaaggttcgtctccttggtcagatttccgattgcaaggcagatgatgcaaatgataagttgtacgaaggtcttcgcagactgatctgtgcagtaatcgatgattacagctatctgatcatgaaatgatgatcctagtacatcgttttcgaaataactataccactcacttgtctgcgaatccgattgcacaggtataaaagcctcagcgtagcccgctacgcctgcgtttttataccagcacactcgaatccgcatcctacgcgattggtatagttatttacgaaacgctgtactagagcgtgtctgaaaacaggaataaagagctgtaaaataattttaaatttgtaatatcagataacttataaagaaatatttaactctgtccacagcagaaaaaggctgtggacagcgttgcatatcaggctgaatcgcggccgcatgttacttttataataaattcatgcggtatcacaggcagataaaaaacagaaagaggtaaactctggctgactgccctaattggcagacgtgcgaaaaagaaaggagagtccgatatggcagtatttacagtcaatggacaaaaggtcgaaccgaccggaaatcagaaactactgcgctttttgagggatgaacttcatctgacttcagtgaaggacggctgcagtgaaggagcctgcggagcctgtacagttataattgacggaaaaacatgcaaggcatgtgtgccggacacagatttactggatggcaggacagtgatcacagtagaaggactgactgaatgggagagggaagtctatacctacgcttatggaaaagcaggtgctgttcagtgtggattctgtattccgggtatggtaatgtgtacaaaggctcttctggacgtgaacaaagagcccacagatgatgagattaaatatgcactgcgcaataactattgccgctgcacgggctatgtaaaaattatggatgcagtaaggctggctgcgaaagttttaaagacgggtgtgatcccggatgatctggatccggactggaatataggacatagagtatccagagtggatgtggaggagaaagtactgggaaccggcaaatatccggatgatttttactttgacggaatgctgtatggggtggcactcagaagtaaatatccacgtgcacgtgtacttgagatcgatacagcagcagcaaaggcactttccggggtagaagcggtattaacagcagaggacattccgggagagaataagatcggacatctgaaacatgatcagtattcactgatacctgtagggggtctgacacattatcttggagatgccattgccgttattgctgcaaaagacagagaaacagctgagaaagctaagaaactgatcaaagtaaaatatgaagtgctgcctcatattcgtacaattgaggaagcagcggcagaggatgcaccgaaggtatttgatgaagaagaaaataatatctgtgcacataaacatatcagcagaggaaatgcagatgaagcaatccgtaattccaaatatgtgatcagtcatcattttgaaaccccatggacagaacatgcatttcttgagcctgagtgcgcagtggctttgtatgatgaggacggagatattttcgtatattccacagatcagtctgcacaccagacattacatgagtgttccctgttacttggaacggacagagtaaaggtacagaatgcacttgtaggcggcggattcggcggaaaggaagatatgacagtacagcatctggctgcgctgctcacttatgctactaagaaaccggtgaagatgaaactgaccagagcagaatccctgctggttcatccgaagcgtcatccgttttatatggatatgaccatgggctgcgatgagaacggcaatatcatgggggtaaaagcgaaagtagcatcagatacaggtgcatttgcctcacttggcggtcctgtgctggaacgtgcatgtactcatgcggcaggtccctatcattatgagaatttcgagattgaaggaactgcttattataccaacaatccgcctgccggagcgtttcgcggttttggtgtaacccagacctgttttgcaacagaaaccctgctgaatatgatggcagacaaagtaggtatcactccatgggaaatccgttaccgcaatgcgatccgtcccggtgagacgcttccgaatggtcagatcgtagataattccacaggtcttgtggagacactggaagctgtaaagaagaagtatgatgctgctctggaagaaggaaaaccggtgggaatcggctgcgccatgaagaatgccggtgtcggtgtcggtatcccggatacaggccgcgtgaaactcgtatttgagaaagataaaaagctgcacatctattccggcgcttcctgtatcggccagggacttggtacagtcctgacacagatggtagtcaccaatacagatctgaagcatgaagatattgtatatgagagaagtaatacctggttcgcaccggattcaggtacaacttccggctccagacagactctggtaacaggggaagcctgccgcagagcctgcgataaggttatggaggaccgcaatgcaggtaagaccattgatgatgtgatcggtaaaatttattatggggaatatcttgcaaagacagatcctcttggcgcaaatgtgccgaatcctgtttcccatgtagcctacggctatgcgacgcagatgtgtatcctggataaaaaaacaggtaagattgaggaaatggttgctgcacatgatgtgggcaaggcagtcaatccactgtcctgcgaaggtcagattgagggcggcgtagtgatgtccataggatttgcactgagagagcattatccgatcgatgagaactgtaaaccaattgacaagtatggatctcttggcctgttccgctctcatgagattccgaaaatcgatgccatcgttgttgacaaaccgggactgaatgtagcctgtggtgccattggaatcggtgagatcacctctatcccaactgcacctgcaattgcagatgcatatttcagatggaatggtgaaagacagtacagtcttcctctgaccggaacaccatatgaaaggaagtgctgaatatggcagtaaagaagaaatttccatatcgcgcggctgtagttgcatgtaatgggggatgcagatcagccgaaggtgaggccggctgtgcagatggatgtatcggatgtaaagcctgtatagataaatgtaaattcggagccatttccatcaatgagtatggtgtggcggaagtggatgaggagaaatgcattggctgtggtgcctgcgcaaaagtctgcccacagaaagtaatccatgtccatgagtgtgcaaactacattgtgataaaatgttccaataagaaaaaaggtgcagaagcaaagaaacagtgtgacgtcagctgtatcggctgtggaatctgcgagaagacctgtacagccggtgcgataaaagtaaaagacagctgtgctgtgatcgaagaatccatatgtctgagctgtggtatgtgcgcagtgaaatgcccaagacacgttatccatgacctgcatggaatattgacagaaatacgttaagtaaatcaggttactgttcactttgttcttagtaatacattacaaaggatattctcagtgaacagtaacccaatcaaacaacttcgttaataggaaaataatacgtaaaaattgaataaaagattgcaatttcatatccaaatatgctatacttaaatcagaaaacagataacaattatgcaaataaaaagtaaattcgcctgatgtcagaaaaaaggtgaaggaaagtagcatggttcggagccggacataagtcctgaggggaacagacagataccttggggtgtgtccggctccttctatataataaccaaaaataaatacagagaaggtgaaaacatgattggaaagagtgttccaagagtagatgcctatgacaaagttacaggacgtgcaaaatttactgatgacctggttcctgccaactgtctggtggcaaaaatctatcacgcaaagatcggaaacggtatcgtaaaatcaatcgataccagtaaagcagaggctctggacggcgtagtaaaagtggttacttttaaagacgtaccgaatcattgttatcctacgccgggacatccctggtctgtggagctggcacatcaggatgttgcagaccgcaatatccttaccggaagagtccgttattacggagatgatattgctgctgtagtggcagaagatgaaatcacagcccagagggcattgcgcctgatcgaagttgaatatgaagaatatccggtagaaatccatccgcgtaaatccatgtatggaagcaaaccgccaatccatctcgataaaaaggacaatgtacttgtccgttccaattactttatcggaaatgtggaagaagggctgaaggaatccgaaacagttataaaacgcagttataaaaccccgatcgtgcagcactgccacattgagaatcctatttcctgtgcatacatggaaaatggcaggatcatagttgtgacttccactcagattccgcatattgtccggcgtgtgatcgggcaggctcttggaatcccatggggaaagatcagagtcattaagccatacataggtggaggattcggaaataagcaggatgtgctgtatgaaccgttaaatgcgtttcttaccacgcaggttggcggcagaccggtcaaactcgatataaccagagaggaaactttctgcaacaccagaacccgtcattctattgagtatgatctgacggcaggtgttgacagtgaggggtatcttctggcaaaggatatgctggctatttccaatcagggagcatatgcctcccatggacatgccatagcagccaatggcctgactgcctggaggctacagtatgcatgtccgaatatcaaaggagaggcatatactgtctatacgaatacaccggtaggcggagcgatgcgtggatacgggatcccgcaggtatgttttgcaattgagtgctttatggatgatattgcaaaagagatcgggatggatcctctggagttcagaaagaaaaatcttatcaaaggatattatgaggatgcttatctgaagccgatcgcagcaaacaccaacgggatttttgaatgtctggaaaaaggtgcagattatatccactgggaagaaaaacgaaaagaatatacaaaccagacaggtaatatccgcagaggcgtcggaatgtcacttttctcctataagacaggtgtatggccgatttcactggaaattgcaggtgcaagaatgactctgaatcaggatggaagtgttggcctgatgctgggagctactgaaatcggtcagggcgctgatacggtattttcccagatgacggctgaggttttaaatatggatatcagtgatattcatatccagacagtccaggatactgatgtaacgccatttgataccggtgcctatgcatccagacagtcgtttgtaacaggaacagttgttaaagactgcgcaaatcttctgaagaaaaagattctggattatgcaaaagagctgttgcctgaagagacaaggaaactgaggcttgatcatgggtggatcatggcaggaaaggatcctgcaatatctcttggaaatcttgcattggagagttattacagtcttggcaattcttctgttattacagcagaggtttccgagcaggtaaagaaaaatacgattgccacaggatgctgctttgctgaagtggaagtcgatataaagcttggcaagatcaaaatccttcatatcattaatgtgcatgacagcggtaagcttattaatccgaaactggctgaaatgcaggtacagggcggtatgtctatgggaatgggatacggtctgtcggagcagctcattctggatgaaaaaacaggaagaccactgaacggaaccctgctggactataaactgatgacaatgatggatactcctgatatcaaggcggattttgtggaacttgatgatccgattggacctttcggaaacaaagcactgggtgaaccgccggcaattccgggtgcaccggcaatccgtaatgcagtacttcatgcaacaggtgtagcctttaatgaaaatcctctgacaccacagagactgatcgatggctttataagggccggacttatttagaggggaggggattttatgtacgatattgagaactattatcaggctgaaagtgtaaaagatgctgtgagattactgaatgaacatccggatgccaggatcatttccggaggaagtgatgtgctgatcaaaatccgggagggaaaatttgccggaacttctctggtgagtatccatgggatcaaagaaatccagggtgtaaaaatggcggataacggagatatttatattggtgccggaactgtcttctcacatataacaaatgatgcaattatcaggaaatatattccggttcttggcgaggctgtagatcaggtaggaggaccacaggtacgaaatattggtactatcggtggaaacatctgcaacggagcagtcagtgcggacagtgcaccgaccgtattttccctgaacgcactgctgaggctggaagatggaaaggaaggccgtcttgtacctgtaaaagatttctatcttggacccggcagggtggatctgcggcagggagagatcctgacctatgtgatcattcctgcaaaagaatatgaagggtatcatggtcattatattaagtattccatgcgaaatgccatggatatcgcaacgatcagctgtagtgtggtgagcaaggtagatcaacaggcaggagtgatagaagatgtgcgcattacctttggagttgcagctccggttccgtaccgctgcacaaaggcagaagaggctttgaagggcatgaagatagaagaaagcctgtatgaaaagacagcacaactgatccgggaggaaatcaatccgagagattcctggagagcatccagggcatttcgtcttcagatcggcggagaaattgcggcacggactttgagacgtaccgtagaacttgcaggaggtgaccgcatatgaaaaagcagatgcagcttgtacgatgtacagtaaacggaagagaagttgaagaatatgtagatgtaagggagtcactgcttgatatgcttcgcaaccgccttggactgacttctgtaaaaaagggctgtgaagtaggagaatgtggtgcctgtacagtaatcatagacggagagactattgactcctgtatttatctggcagtctgggcggagggtaaaaatatccgtacactggaaggtctggagaaaaacggagaacttaccaggattcaggaggcatttatcgaagaaggtgccatacagtgcggtttctgcactcccggatttatcatgtctgccactgttttactggaacatggagagaaattatcaagagatgcgattcggaaacatatggcaggaaatctctgccgctgcacaggttatgagaacattgtaaatgcggtggaaaaagtaatggatgaaaatgagacaagaagaggaaagacagtaagatgacaaacagatacacaaatgtcccaaaatctgacaataaaccggaaaatgttgtaataataagaggtggcggtgatctggccagcggtacgatccacagattataccgatgcggctatcgtcttctggtactggaatgtgagaaacccactgcgatcaggcgaatggtttctttttgcgaggctgtttacgacgggcagtcttctgtggaaggagttctctgcagaaaagttgacagtgtagaggaatgcgaggcagtctggaaagccggggagattcctcttatagcagacacagaaggaactgtccttaagaaatacagacctgcagcactgatagatgcaattcttgcaaaaaagaatcttggaaccaccagagagatggcagatctaaccgttggtcttggaccgggatttgtggcaggtgaggatgtggattatgtagtggagactatgagaggccacaatcttgccaggatcatcacaaaaggcgctgctatgccaaacacaggagttccgggtatcattggaggatttggaaaagagcgcgtgctccatgctcctgctgcaggggaaatccattgtatctcaaagattgcagatatcgtggagaaggatcaggtccttgcctggatcggagatacacctgtcagggcttctcttacaggagttttgcgtggcatgatcagagatggatttacagtgccgaaggggatgaaaattgcagatattgatccgcgcaaagaacaaaagaaaaactgtttcacgatttccgacaaggcccgctgtattgccggcagtgtattggaaatcctgctttcagaaggagtgatgccatatgaagcaccagatcgattttctggaactgctgcagattgattatgaaaaataccctgtgatcgctgtagttggcggcggcggcaaaaccagcctgatctaccgtcttacagatgaactgatcgataagggaaagagagtgatcattaccacgaccacccatatggcaggagaatctgaacttccgtttgccaggggcggagatgcagtcagggtaaaagaacttctggacaaagaaagatatgtgattgctgcggaatatgaggaggacacaggtaaatatgcgtctctgacagatgaaaaactggaagaactgagagaattatgcgatgtaatgcttgtggaagcggacggagcaaagcatcatccggtaaaagtcccggagaaatgggagcctgtaatccccagatgtgcggacattgtgatcagtgtgatcgggctggactgtctggggcagccaatcagtcagagtgcttaccgtatggaacgtacctcggaatttctcaggaaaagtctggaagctccgattactgaagaagatattgtaaagattgcgacttctatctgtggactttttaaggatgtggaagaaagagtatacagagtgtatctgaacaagtcagatatactcagagagaaagaacctgcagagcacattgttgaggaactggaaaggaagaatacagtagcggcttacggaagccttttggaggaataaattattttgaaaattgcaatgatcatgctggcggctggaaacagccgccgttttggggcaaataaactgttatatgaaatagacggaatacctatgtatcgacatgtgctggaacaactggatgatacaaagaagaaaatagaaaatatctattcggaatattcagatattacagaggataataataatgataataattcagatagtgttcagtcaaataacctgtacagaaataatattacagcaaaaataatctgtaatattattgttattactcaatatgatgccattgcagaagcagtgaaaacaaaggaaatacaggttttgtataatccccatccggaagatggaatttcttcctctgtaaaaatcggtctgaatgccagcctggatgcagatgcagtgctttttactgtgtctgatcagccctggcttaccagtgagacaatctgtaaactgatccatgtgtttttaaacacttccaaaggaatcgcctgtgtttcctgtcaggggaaaatgggaaatccatgtatttttgacaggaaatattacaatgagctgctttctctggaaggggataaaggcggtaaaaaagtgatcatgaaacatctggatgatacgcagatttatgagatagaagcaggcagggaactggaagatattgattattatgaatctatagcagtccactagagcgtgtctgaaaaatgctttccgcaagatgtatgtcaaaatataccgaaaagtggggcgtgcagattgcaggaatgattttccagacactctggtccactcatcacaaaaaaagttccgggcaaggtcaccggaacttttttgcgcaattatttcgctatatagcagatatcctgaatatgtggcagttatatatatcagtattaaacagctgatatataataagatatctgctgaacagattaaagatggattttggttccggtttttccctggataccgtctttggctttctgaagtaaagtgatcatggcagttcttccttctttggagcttgcaaaatcaacggcagcctgaactttcgggagcatggaacctggagcaaactgtccctcattaatatatttcttagcgtcatctacagtgatgtcatccagccattcttcgttttccttgccgaagtttacagcaaccttctccactgctgtaagaatgataagcatatctgcatccagctctttggccaggagacagcttgcataatccttatcaataactgctgatgcacctttgagatgatgtccgttaagaacaacgggaattccgcctccaccgcagcagataacgattttatttgcatccacaagactgttgatcgcatcctgttcaacgatttcaacaggctttggagatgcaactacacgacgataaccacgccctgcgtcttctttcatgatatgtccatatgccttggcctgatggtctgcttcctcttttgtcaggaatttgccgatcggcttggatggattttcaaaagcaggatcattgggatctacacgaacctgagtgacaacagtgacgacaggtgtgcggacaaatcctctgattcgaagttcctctctcaaagcattctgcagatcatatccgatgtaagcctgactcatggcaacacagacagagagaggagtgtttggctgattctcatcttctctggagagagcagacatggcattgttgatcatgccaacctgtggcccgtttccatgtacaacaacaacctgatgaccttcttcaatcagatcgcataatgcttttgcagtagtttttacagctaccatctgttccgggagagtatttcccagagcgttcccaccgagcgcaataacgattctttttcttgtaaacatttgtaaaaacctcctgattttaaaggcaaagagggccgccgcaataaagattgtgtgctttctgcgacagccccgcctgctatacaatatgatgagtactatttttcaatatatttaaattctgaaactgctttcaaaattaaatatctgtttgaaagcagctggaatattactgcaatccaactgttaatctgcgcctgattatttcaggattcttggagctgctttgacttcaagtttcttcaggatatcctgtggattttcaaatttggaaagcatgatcatagcagcgatgatgtatggtttgaagcttgcttctttgtataacgggattctgtaacgatcgaatacagaagcgtcaacctcacctgtttcgcagcttacacctgtaatatcagccggcaggcagtgcaggtaaagagcttttccgtcttttgttgttttcataagttcttctgtgcaggcccagtctttgtgctgtgcattctgtgcaagaagttctttctctaatttatcgattccgtcgaagtcgccttctgcataaaggtctgtacgtttttccatagctgcaaatggagcccagctctttggatatacgatatcagcatctttgaaagcttcagccatatcgtttgtctttgtgaaggatccgccgtttttctcagcattcttcttggcaatctcttcaacttccggcattacatcatatccttccggatgagcaagaacaacgtccatgccgaaacgtgtcatcagaccgataacgccctgcggaacggagagtggtttaccataggatggagagtaagcccatgtcatagcgatctttttgcctttcagattctcaacaccgccgaattcatggatgatgtggagcatatctgccatacactgtgtcggatggtcaacgtcgcactgaaggtttacaagagtaggtctctgctcaaggataccgtctttgtttccttctgtaacagcttccatgaattctttctggtaagcatgtccttttccgatgtacatatcatcacggataccgatcacatcagccatgaaagataccatgtttgctgtttcgcgaacagtttcaccatgagcgatctgagatttcttttcatcaagatcctgtacttccagaccaagaaggttacatgcggaagcaaaagagaaacgtgtacgtgtggagttatcgcggaagatagagattccaagaccactctcgaatacttttgtggagatattgttctctctcatgaaacggagagcatcagcaactgtgaaaacagcttccagttcatcatctgttttgtcccatgtccagaagaaatcgttgttgtacatttctttgaagtttaagctgtttaatttatcaatgtaatcctgtaatgttttcataaaatcaatacctgctatgctttgatagcttatcctttcctgatatgaaataattgaatctctgcgtttggcagaacaccggttatccggctgtatctgtttatcttgtgtccctgcctgttacagcagggattctgtccggacacatattaagcctttaggatgataggaaatccgtcgcctaaaaaaatttgaaaatctatttattatttgcagtatgcagttggaagagcagcgtatacagcagcgcatcttacaaggtcgatcttccatgttttttcgttcggagcatgagcctgtgcttctgcaccaggtccgaatccgatacaaggaatgctgttacgtcccatgattgttacaccgttagtagagaatgtccatttgtctgtaagcggacgagcttttctcatgccttctgtctcagcatttccgagacgctcttcgccgtacagtcctttatatgcttcttccagagcctgtgttactttgtgatctttcgggattacccatgtcgggaagtagcactcgatcggatatacaaggtctgtataggacggacggttgtattcatacatggatactgttacgtcgtcgccatatttctgtacagccggaagagcacggatctcatccaagcagctttcccatgtttcgcctgctgtcatacgacggtcaagagatacagagcaggagtcagctactgcacagcggcttggggatgtgaagaagatttcggaagtagtaacagtgccacgtccaaggaaacgtgcttcttcccattcagggttgtatttctcatcaagcatttttacaagacctttgatctctgtggtatcagcagcatcgttttcgtttaatgcgcggatatcctggagaatatcagccattttgtagattgcattgtcaccacgttccggagcggaaccatggcaggaaacaccctttacatctacgcggatttccatacgtccacgctgtcctctgtagataccgccgtctgttggttctgtggaaacaacgaattcaggacgaacaccatcttcatggatgatgtactgccagcagagaccgtcacagtcttcttcctgtacagtacctgtcacaagtacctgatatttatcgtttaaaagaccaaggtctttcatgatcttagcaccgtatactgcagaaacaataccgcccatctggtcagatgttccacgtccgccgatttcttcatcagattcgaaaccttcgtatggatcaaattcccagttcttgatattaccgataccgactgtatcaatatgagcgtcaaaaccaatgagagttttacctgttcccatgtagccgaggatattgcccatcggatcgatctgaactttgtcgaatccgactttttccatttcctctttgattctcatgatatgtcctttttctccgcagctttcgccaggaatgcgaaccagatcgcgaaggaacttagtcatatcatccttataacccattgcagcttcgttaatttttgcgtaatccatttttttaccctcccaatatgtataaaatattatgatgttagggtcaaaaggtattttgcccctaatctgatatcatattattagttactggtatatcattttcgagataaccataccacttacctgtctgtgttcaccaaaaacatcatttacttaaagattcgtctgttccgtataatccgtcccatacgatctcgcggtagcgaacagggtcagtgtcaccttctgtggaaataacaagtactacggaattctcatccagtttcagcgcttcttttaagtcttttgcatcttcatcgtgaagagcagtgaagcagaaaccaagcggaacggaaccggattcaccggagacaacgtgtggatcatctcccagtggattagcgtagatacgtgttgcctttgcgctcatccagtcaggacaggatgcaaatacatctacgtgatttttcaggatatcccatccgatcgtatttccctcaccgcatgcaagaccggccataattgtctgaagatcacctgtaacatttaccagatttcctgtctttgcaacagcggagcggtacaggcagtcagcagcacttgcttcacagacagccataaccggcgggttatctttatatttatgagcgaaataaccgactacggcacctgctaaagaaccaacaccggcctgaacaaatacatgtgtcggacgttcaacacccatttcttttaactgctggtcagcctcaagaaccagtgttccgtatccctgcatgatccaggatggaatttcttcatatccgtcccatgcggtatcctgaacgatgataccatgttctgttttggcagcttctgctgcagccattcttacgcagtcatcatagtttacttcttcgattgtaacagtagcaccttctttgacaatgttatcgaaacgagtctttgttgttcccttaggcattcttacaactgctttctgtccaaggcggttagctgcccatgcaactccacgtccatgattaccgtctgttgcagtaaagaatgtagcctgtccgaattcttctcttaatttatcagaagagagaacattgtatggcagctcgctgatatcacgtccaagttcttttgcgatatagcggcccattgcataagaacctccaagtactttgaaagcatttaagccaaagcgataggattcatccttacagaaaatattttttactcctaaatatttcgcaagggatgaaaggttctgaagaggcgtcacactgtactgtgggaaacttctgtggaactcatttgctttctttacattttcttcggacatcagttccaggtgtttatcatctgatttcggaacctcgtttacagtccattttaatccttctgtcataaaatgacctcccttaaaaattatcatttggtttccttaacttgtgattctatcataccatatattttaaaaattgcaatagaaaaatacaaaaatttttaggtttttcaaaaaaaaattaggtttcataatttgtacattgatataaggatttggatatgataaaataatgagtaatgttcgttttatttttacaggatagacagtaaagtgggtataaaagagcaataaaaaagatacagaagaggagaaaatattatggcagtatttcatgcattccgggcacttcgacctacaccggaaaaggctgctgatgtggcagcacttccatatgatgtggtaaaccgggaagaagcaaaatcaatcggagatgagaatcccctgtcctttcttcatattgacagaccggaaatggatctggaacctgagacagatctgtatgatgatcgggtttatgaaaaagcaaaagaaaatcttgacaatatggaagaaaagggaattcttgttcaggatcagaaggcctgttactatatatatgaacttgtaagaaaaggaaagacacagaccggtatcgtaggatgcagttccattgatgattatatgaatggtgtagtgaagaaacatgagcttaccagagaagataaggagcaggacaggatccaccatgtagattcctgtaatgcaaataccggtcctatttttctggcatgcagatatccggattctctgcttacactgatgaataactggaaagatcatcatgaagcagcatatgattttacagaagaggatcagatcacacacagagtatgggtgattgatgaagatgaggtcatttctgaaataaataaggaatttgcagggattgattctctgtacatcgcagatggacatcaccgcgcagcttccgctgtaaaagtaggtttaaagagaagagaacagaatccgggatatacaggggaggaagagtttaattatttcctgtctgttgtatttccctatgatcagctctgcattcttccttataacaggattgtaaaagatttgaacagcctgactgtaaaggcatttctgggcgccctgaagttcaactttgaactgatgctgatgccgggatttccatgcaagcctgtagagaagcattgtatgggaatgtatgtggacggacagtggtatcacctgaaagcatggccggatatctatgagaagaaggacgtggtcggacagctggatgtatccattcttcaggaaaaagtcctcagaccagtcctgggaatcgaagatccgcgcacagaccagagaatctcctttgtgggcggaagccataaggcagcagagctggtagagattgcggacagaaccggcggtgtagcctttgtcatgtacccgacatctatggaagacctgatgaagattgcagacgagaacaaattaatgcccccaaaatccacctggtttgagccaaagcttcggagtgggctgtttatacataagttataatttgccgaagatgttactgttcactctgttcacagcaacacgcttcgcgatgcacagaatttatgctaatcgcataaattcgcgcggtatgtctcgggttttctgtgaccttcgctcacaaaaaacacctcgcggaatattaccagtgaacagtaacccgaagatgtcttataaaaatattataataatttcgctgtagactttttcttccttcaatggtacaattggttctatacaaaagagaacgaaacgtactacaatgaaaggagggaagaatttggaagatgcggaattgagaaatatccttttttctatacagggaagcattgccggttttcaaaatgatatgtccgatgtaaagaacgatatcgcagatatgaagacagatattgcaaacatgaagacggatatcacgaacatgaagacggatatcacgaacatgaaggcagatatcacaaacatgaagacagatatcacaaacatgaagacagatattgcgaacatgaagacggatatcacgaacatgaaggcagatatcacaaacatgaaggcagatatcacgaacatgaaatcagatattgtgcaactcaggggaagcgtaaaaactatagaacttaaactggaaaatgaaattggcagaaaaatatctgccctatttgatgcacgtatggatgagcttcgctatagaaaggagaataaggaaactcgagagaaagtttttgaactggatatgcgtgtagacaatttggaaaaggccatcatgccagcgtaactgtaacagatgattgtaaggcttgtacataggagaaacaggaagaaattttataacataaaaaagtacatgaaatttcttcctgctaaatttgtataatttttgtaaatttttcaaaaaacagttgaaatcacagaaataatttgttatactaacttgcgttacggggtatggcgtagcttggtagcgcgcacggctgggggccgtgaggtcgcaggttcaaatcctgttgccccgactgacatatggttaaatcgtttgtagtatatttacaatgaatgattcagacgtatgttcatttcaaaaaagccaaataaagttataagtaaaatgcaatgataaggaatagtacacccggaccggagcacagagaactgctggttgctgagaagcagtggaaggaaattgtggaactcgcctttgagcagctgcctgaaattatacaagagtaggtgcagacggtttccaccgttatatggagaggatataagaataccggatatccggagattccgtatcccatgagtgtatgacattgttcataaataagagtggtaccgcgtaagatgataatatctttcgtctcttgcagataagtctgtggagatggaagatttttttatgtctttttacagtcaatccccacagtccaaacataatatttacataacggaggaagaaaaaatgatgaatccaagcaaatatcagagacagtattttatgccacctgttaaatgcatgaaatgggcagaaaaagaatatgtggacaaagcaccgatctggtgttctgtagaccttcgtgacggtaatcaggcactggtgattccgatgagtctggaacagaaaattgaattctttaaacttcttgtaaaaatcggtttcaaagaaattgaagtaggtttcccggctgcttctgaaacagaatatgaatttctgcgtaccctgatcgagcagaatctgatcccgcaggatgtaactattcaggttctgactcaggccagagagcatatcatccgcaaaacttttgaagctgtcaaaggcgcaccgaaggcaattgtacatgtgtacaattccacctctgtagctcagagagaacaggtatttaagaaatccaaagaagaaatcttaaagattgcagtggatggtgccgcattattaaagaaactggctgatgaaacagaaggaaatttccagtttgagtacagccctgaaagctttacaggcacagaaccggaatacgctctggaagtatgcaatgcagttcttgatgtatggcagcctacagcagataacaaatgcatcatcaatctgcctgtaactgtacagcattccatgccgcatgtatatgcaagccaggtagaatatatgtgtgaaaatctgaaataccgcgagaatgtaatcgtatctctccatccgcacaatgacagaggatgcggtgttgcagattctgaaatgggattacttgcaggtgcagacagaatcgagggtactctgttcggaaacggtgagcgtaccggaaatgtagatattgttacacttggtatgaatatgtattctcagggtgtagatccaaaacttgacttctctgatatgccacatatctgtgaaatatatgaagaatgtaccggaatgaaagtaggcgaaagaagtccgtacagtggtgcacttgtatttgccgcattttccggctctcatcaggatgcaattgccaagggtatgcactggagagatgacaaggatccggatcactggaatgttccgtatcttccaatcgacccgacagatgtgggaagaaattatgacgcagatgttatccgcatcaacagccagtccggtaaaggtggcgtgggatatatccttgagaccaaattcggtcttaaccttcctccgaaaatgcgtgaggcaatgggatatgccacaaaagctgtttcagatcacaaacataaagagcttcatcctgacgaaattttcaatctgtttaaacagacctttgagaatatcacagaaccgtacagcatcaatgaagtacatttccagcagaaagatggtggtattgtaacaaaagttacctctactttccgcggaaagacaatcactacagaggcatccggtaacggacgtcttgatgcagtcagcaatgcactgaagaaggcatatgagctgaaatattccctggaaacatatcaggagcatgcgctggagcgcagttcaagttccaaagctattgcttatgtcggtatcaaaaagccggatggaacgcttgcctggggtgcaggcgtagacgcagatatcattcgcgcatctattgatgcacttgtaacagcgatcaataaccgttagattgttccgacacgcccgattctgtcctgctgttttttgacttctgcaggtcaggctaatatccgcttggcagggaataatatagtttacataaaatatcaaaaatcagataccggtcagattgtccagaggacttcctgaccggtatttttttgtatttataaaaatacaagaaagtcttaatgtacgcgataaagtacaataaagaagcaaactccgatgaaaagctatcagaattgtatttaattaaaatcataaaggaaattaattgacataacactcatgtttacgtatactgactgcatgggcagaaaagtgtcctaaataagtacaatttacattttattatctcactccaggccagtgagagatgcgcggaaatattttagagaaagaggtaaaagaatgaaaaatttcgaacagtggaatggctttaagggcaaccgttggaaagaaaaaatcgatgtacgtaactttattggaatgaactatacaccatatgacggtgatgcttctttcctggaaggacctacagaagctacaaacaaactgtggggcaagctccaggcacttcagaaagaagaacgtgccaaaggcggagttcttgatatggagacagaggtagttacatctctgacagcatatggtcccggatatattgatgaagaaacaaaagaccttgaaaaagttgttggtcttcagacagataaacctctgaaacgtgctttcatgccatacggcggtatcaaaatggcagagcaggcttgtgaaacttacggatataaagtaagtgacaagattaaagatgttttccacaactatgaatttaaaactcacaaccagggtgtatttgatatctacacacctgagatgaaagtagcacgtcacaacaagatccttacaggtcttccggatacttacggacgtggacgtatcgttggcgattacagacgtgtggctctgtacggaatcgacgctctgatcgaaggaaaacagaaagacttcgcagcatgcgaccgtcagggtatgagacgttatgacttccagcttcgtgaagagatcgctgatcagatccgtgctctgaaaggcatgaaagttatggctgaatcttatggatatgatatctccaaaccggccaaagatgcaagagaagctttccagtggctgtacttcggatatcttgcagccatcaaaactcagaacggtgctgcaatgagtgtcggacgtatttccacattccttgatatttatattgaaagagatcttcagaacggaactcttacagagaaagaagctcaggagcttgttgaccacatggtaatgaaattccgtatggttaaatttgcacgtatcccttcttacaatcagttattctccggtgacccggtatgggcaactctggaagtagcaggtatgggacaggacggacgttccatggtaacaaagaacgactatcgtttcctgcacacactggaagatatgggaccggctccggaaccaaaccttacagtactttattcttcaagactgcctgagaacttcaagaaatatgctgcaaatatttctgttacaacaagttctgttcagtatgagaatgatgatgttatgcgtccggtatggggcgatgactacagcatctgctgctgtgtatctgctacagagacaggtaaagagatgcagttcttcggcgctcgtgcaaaccttgcaaaatgccttctttatgcgatcaacggcggtgttgatgagaagacaaaacagcaggtaggaccaaattatcagccgatcacttctgaatatcttgactatgatgaagtaattgcaaaatatgacaaaatgatggactggctggctcatctgtatgtcggaacactgaacatgatccactacatgcatgacaaatactactacgaagcagcagagatggctctgatcgatacaaaagttgagcgttctttcgcaacaggtatcgcaggattctctcatgtagtagactccctgtccgctatcaaatatgcaaaagttaaagctatccgcgatgaagacggcattacaacagatttccaggttgagggtgacttcccacgttatggtaatgatgatgacagagcagacgagatcgcaacaactcttctgtctacattccttgagaaactgaaacacatccatacttaccgtgattccaagccaaccacatctatccttactattacttccaacgttgtttatggtaaggctacaggatctcttccggatggaagaaaagcaggtgaacctcttgctcctggcgcaaacccatcttacggtgcagagcagaacggtcttcttgcttccctgaactctgttgccaagcttgactatgaagatgctcttgacggtatctccaatactcagacaatcaatcctgatgctctgggacacagtgatgacgagcgttcagagaatctggtacatgtacttgacggatactttgatcagggcgctcatcacctcaatgtaaacgtatttggtaaagagaaactgatcgacgctatggaacatccggaaaaagaagagtatgcaaacttcacaatccgtgtatccggatatgctgttaagttcatcgaccttacaagagagcagcagttagacgttattgccagaacctgccacgacagaatgtaattaatggatgatgatataatggataataaacagataaaaggctatgttcattctttggaaagcttcgggtccgttgatggacccggagtaagatatgtgattttttttagcggctgtgccatgagatgtcagttctgtcataatccggatacctggaagatgaagcagggagagctttatacggcagatgagcttcttaagaaagctttacgttataagggctactggggcagcaaaggcggtatcactgtaagcggtggtgagccattgcttcagatggattttcttacagaattttttaagaaggcaaaggcagagggtgtgcatacgaatcttgataccagtggaaatcctttcactgatcaggaaccatggcattccggatggctggagcttatgaagtatacagatcttgtaatgcttgatatcaagcagattgacgagcaggagcatattaagcttaccggtcattccaataagaatattcttgcgatggcgcgggaactttctgatatgaaaaaacctgtatggatccgtcatgtgcttgtgccgggcggaagtgataaggatgaatatctgcaccggttagctgattttatccatactctttccaatgtggagagagtggaggtgctcccttatcatacgcttggtaagtttaaatgggagaatctggggctttcttatccactggagggggttaatcctccgacgcaggaaaggattgataatgcccggaagattcttggagctatctgagtaaaaatatatagctgtcatatcctctttttggggtatggcagctttatttgtttaaaaaagggacgcgaagcaggcgtatagttgtaccggatacggtttcggcatctaagagattctaagtcctcagaaatctgctaaaagcatgaaacgaaaagtccgggattactcgctgccgctcagacaagggacttttcgtctcataacgcagatttctgagaactaagaatctctaagatgcctgcaaatgcatccggtacaactatacgcctgcttcgctggttttggttaagatataatacaaggtggagtgtgaattataagaaggactttgtttatataaaaatgaattgagatgcgaaatatatcccccgggagggcttgttgggggaagggtggatttgatataatttgggtcatatatgattataaattgcgtgcatggaggttggcataaggtgaaggatttattatcggagattgagagttactggactacccgggctgaggggtattctgaagttaatcataaggaattgaatgggatgcagaagggggcatggcttgaggtgttgaaagggcagttcccggagaaagcgaaggatgagattaagattttggatatcggaacaggacctggattttttcctgttattctggctgaggcgggatataaggtgactgctgttgattatacacaggagatgttggatactgcgaagaggaatgccggtaatctttgtgagcggatttctttttataagatggatgctcagaatctggaatttgaggatgatgtgtttgatgttgtgatcagcaggaatctgacatggaatctgaaggatcctaagagagcttatgaagagtggtgtcgtgtactgaaaccgggcggaaagcttcttaatttcgatgcaaactggtacggttatctttatgatgaggagaaacgcctgtcttatgaggaagaccgaaagagtgtggagagtgagcatctggatgatcattacctctgtacggatattgacagaatggagaagattgcactgcagatgcctctttcttctattaacagaccgtcctgggacaggaagtttctgaaggagaacgggtttgagtctgtggcagtggataccgggatctggcagcgggtgtggagtcaggaagagaagctgaattatcattctacgccgatgtttatgatcagcgctgtgaagaaagagaaagatatctggtccgagaatgatggaatgggtgattctgatagcggatatgacaggaaaagagatttggaggatgccatgctgtgtgctgctccgggtacgaaaaagagcggattcctgaaactgggcggaggtgagttttcgcttccttatacagtaatctgcggttctcatcccggaaagacagttctgatcaccgctgcggtccacggaggagaatatgtgggaatccaggctgctgttgagcttgcagataaactgaagcctgagaagatccatggaagagtgatcctggttaagactgtgtgcaggaaggaatttgaggagaggagcggcagtatctgcccggaggatgagaagaatctgaatcgtgtatttccggggaatccgcagggaaccaggatggaccgtctggcgtatgaggtggttcagaagcttcacagtgcagcagattattatattgatcttcacagcggggatgattatgagcagcttacgccttatatttactatgccggatgtgcagatgaagatgtggttcagatgtcaaggaagatggcagagcaggcagatgttccctatatggtaaagtctaatgtggcatccggtggttcttacaattatgctgccacatgtggcattcccagtgttctgatcgaacgtggccagatgggaggctggagtccggaggaggttcattctacaagaaaagatgtgcgtaatattctgtgtgcgctgggtgtttacgatggcatgagaagttacagtaattattatcccatggaaattgaagatgtgcgttatcagtctgccagtgtatccgggctgtggtatcctgccaaaaaaccgggagatatcattaaggttggagagtatcttggctgtgttaaggattatgagggaaatattctggagacaagtttatccgatttaaatggagtggttctatatcaggcgggaagtcttcaggttattaaggatggtccgatgatcgcatatggcagtttcagcagaagaaaggatgaacgcaaggaaaagatcacaaattactgggcgaaaagaagcgacagttttatggaacagagaagagctgagcttcacagtgatatggctgataaatggctgaaagagatcgggacttttcttcctgatggaaaattaaggattctggatgtgggatgcggtgcaggcttcttttccattcttttagcaaaactgggacatgaagttacaggaatcgatctgacaccggatatgatcattcattccagggaactggcaaaagaagagaatgcctcctgtacgtttgaagtaatggatgcggaaaatccggattttcctgatggtacctttgatgtgatcgtgtccagaaatcttacctggacacttccggatgcagcaagagcatataaagaatggattcgtgtgctgaaaacgggaggaatcctgatcaacgcagatgccaattatggtgcagatgatttctcagatactgctgatctgcctgccaatcatgctcattttacagtaggcgatgccatgatgcaggaatgcgaggaaattaaacgccagcttcctatcagttcctatgtacgccctgcctgggatctggagacactgggaaaactgggtatcaacagattctccattgatctgggtatcagcagcagaatttatacaaagaaagatgagttttataatccaacccctatgttcctgatctgcggcgaaaaaaataaatgtaataattgagaaaaatgaagcatatattaaagggagatttcattgatggaaccttccttttttcttttttgcaagctaaaatgttacaaaaatatgaaaaaagcttgacaaaatcaattatattaaatataattttcttataagttacagaaatgttacagccataaaaacctgtaattaaaaaaactcaaggaatgataagtatgaaagttcagaaaaaagagtcaaaacagtccggcaatccggcgcggagtctgatactggttacagtgtgtacctgtacggcgattgcgtttgcagcaggcggcagaatagcagattttaatggaaaaaacaaagtatatgcagcttctgaaaatagggagaaaactttttcctctgatactgacgaaacagatgtactgccaacaggaattgcaggagtagtatccggaatgaatgatacagcttctcccaaaaaatcagtcacacgtatcggaacttcctgtgaacaggtaatggtcggtcagcgaattaaagttattgaagataatatggcagaattcgatgtcagctcttctatggagagcagcatcaatgagttggatgcaaggacagcggctcttgcagagagcgcccggatgatgtcggatgaggactatgatacattgcttcatattgtagaggctgaagcaggtactgaggatgtcaagggacgcattctggttgccaatgtgatcatgaaccgtataaagaataaggaatttcccgatacagtcacagaagtggtatggcagaataccaatggtgttccgcagttttcaccgacttatgacggacgtatcaatgaagtaactgttacagatgagacaagagaagccgtcagacaagctcttgaaggtgtggattattcagaaggagcactgttttttatccagaaatctgaagctgaaagccagaatgtctcctggtttgagaaagatctgaaaaggctgtttaaatacggcgtacatgaattttatacctatccggattcagcagaaagttccacaggatcgtaataaacgatactcttcatataactcatttaacaggattgcggtaatactgctcaaaatatggacatattcttcgggaacaaaagaatatgtccatatttttgatttatagtaatcaatcataaaaagacagaaaaaagagaaataatttaggatagtattttgctaaagtatatgctataatgtgctcaattggcgaaatgaataactgtaactgttcagcggtttattattactgccaatatactgaacagttacgaataactttggaaaggcaggaaatatcatgcaggtattatacaaaagcacaagaggaaaagaagaaaccgtaacagcttctatggctattttaaaggggctttctgaggatggcggcttatttgtgccgacagagattccgaagctggatgtcccaatggatgagctggcaaagatgagctatcaggagacagcatatgaagtaatgaaatgtttccttactgattttacagaagaagaattaaagaactgcatcaacaatgcctatgatgaaaaatttgatacaaaagagattgcaccgcttcatgaagcagacggagcttatttccttgagctgtatcatggtgcgaccattgcgtttaaggatatggcattatcaattcttccacatcttatgactacagctgctaagaagaatcaggtaaagaatgagattgttattcttaccgctacttccggagatacaggtaaagcggcaatggccggatttgcagatgttccgggaaccaagatcatcgttttctatccgaaacatggtgtaagtcctatccaggagaaacagatggtaactcagaaaggcaacaatacatatgttgtgggaattaccggaaactttgacgatgcacagactgccgtaaagaaaatgttcaatgataaggaactggaagcagaacttgatgctgcaggatatcagttctcatctgcgaactctatcaatatcggacgtctggtgccgcagattgtttattatgtatatgcatatgcatcacttgtacgtcagggcaagatcaaagacggtcaggagatcaatgtggtagtacctaccggaaactttggaaatatcttggctgcttattatgcaaaacagatgggacttccggttcacaaacttatctgtgcctccaatgataacaaggttctgtatgatttcttccgcacaggaacttatgacagaaagcgtgactttatccttacaacctcaccatccatggatattctgatctccagcaatctggaacgtctgatctaccgtatcgcaggcggtgatgcaaaaaaatgtgcagagctgatgcagtctcttactgcaggcggcgagtataccatcacagaagacatgaaggcacagcttgcagacttctatggcaattactgtacagaagacgaaacagcaaaaacaatcgcagaaatcttcaaagacagtcattatgtgatagatacccatactgcagttgcagcaggtgtttatgacaaatatgtaaaagataccaatgataccacaccaactgtcattgcatccacagcaagcccatataaatttacaagaagtgtaatggaagcacttggagcagatacagacggtaaggatgattttgcactggctgatgaactgagtgcgctttccggagtgaaacttccacaggcagttgagacgatccgcacagcaccggtgcttcataaccgggtggtagatgcgccggatatgccaaaggcagtaaaagatatccttggaatccgataatcgttactgttcactccgttcacagtaacgtagccaaaattcattccagattgcctgcggcaatggaattttggcttgtatgtctcgggattttggcatattcatgccaaaacacctcgcgggatagtggtgtgtgaacagtaaccgataatctccatattataaaaaatataattaattctacattttatgttgaaaaagaacatatactggagtataataaaaatcagttaaaaacagtgaatatcctgaaatgtacgaggccccttctttttttgaacctacatcgactttaacgggaacccaacatcgcaggccggatgtcaggccgtcattatgcagcggaagacagaaggtctgttgaggatacccacctagctatggctaggcgtcaatgggaagggaacggcatttcgggaactgtaaaaatgagccgtagagaggctcttttttattatcttttggatttaatattattttatgatacgggaggttggaaacaatgggtgtttctgaaagaaagttcggtgtattacagactggggaaacagtaaaaatttttcatctggaaaacaaatccggggcatatgcggaagtgacagattttggagcaatcctggttaaggtctgcgtacctgataaagatggtactttaacagacgtagtacttggatatgatgatctggcatcttatgaagtaaatggatgctttttcggttcaaccatcggcagaaacggaaaccgcatcggcggtgcgaaattctctgtcaatggcaaagaagtagttcttgctcagaatgagaatgacaataatcttcacagcggtcctgacggatttgaaaaaaagctctggaaagtggctgagatttccgatgataaaaacagtgttatatttaaccgtataagtccggatggcgagaatggtttcccgggagaatttgatgtgtctgtaaaatatgagtttacggaagacaacgaactgaggatccattatcagggaatctgcgatgagccgacagttgccaatatgacaaatcattcttatttcaatctgaatggtgagggaagcggaaccgccatggatcagtatcttacaatccatgcaaaatattatacacctgtagccgacagtcattccattcctacaggagtgtatgaggaagttgcagggactcccatggatttcagaactgccaaacagatcgggcaggatattgaagcagaatttgagcagctgaaattcacaggcggatatgaccacaattatgtgacagacaattatgcaaaaggaaacagaagactgatcgcaaccgcatacagtgataaaaccggaattgccatggatgtcacttccgactgtccatgtgtacagttttacgcagcaaattttgtcgaaaatgaacatggtaaaaatggtcatacttacaataagcgggatgctttctgtctggaaacgcaggttgaaccgaatgcggtcaatgttgaagatttccactccccgattcttaatgcaggtgaacagtatgattctgtgactgcttatcatttctacatcagaaagtaaaaatctgaccataaaactaattacatattgatccggtttttttcatatctacagcgttccagcatgaaaagaaccggattttattatccataattcatgtttgtcataacggcagtttcatggtatgatagtaaacagagatattcgaaacagttatctttataattacagcaatcaccataaatgcattatctaaaatgactgctgtaaaataacagaatggagacatatatgaaaaagaaaaataaaacccggtctgttacagggcttttattcgggtttatggaacgtgtatccggagatcacgtaggagcttatgcgacacaggcagcgtattttctgatcatgtcttttattccctgtattctgtttctgactacactggtacggtatacacctctgacctataatgtagtcagggatgcgatcgttgcttttattccggagaatctgcagagttttgttctggggatcgtggtagatgtatacaaaagaagtactgcaattgtccctttgtcagcaattgtggcactgtggtctgccggaaaaggaatgcagtctatcatcaatggattaaataccatttatcacgtaaaagaaacccgtaactggctgttaaccagaatttatgcagtattctatactttatcactggtgattgcggtaatcgtgtctctgcttatgcttgtactcggaaacgaaatacagaaagctgtatcaagatatattccttttcttggaagagttctgggaaaaatactgggggcaagagcactgttggtatttggtgtgttgtttctggtttttcttatgttgtataaggttcttccgaacagaaaagccacattcaaaagccagattcccggagccttgatcatagcagttgcatggtcgatattttcatacggattctctttttattttgagatttttccggggttcagtaatatgtacggaaaccttgcgacgatcatcatggtcatggtgtggttgtatatctgtatgaatcttctgttatacggtgcagagatcaatgcttattttgaaaaagaattccggattgcacataaatcggtacaggaactgctggcacatgaaaaagaaaaaaagcagcaggaaaatgaatgaattttggctacgttgtgaacatgacagtcagggggctttttattgtaaagcctttctgagtgtgctataataaaccataattttggagaaacaaaaaggaatcagttctatgatcgttgtatatttgatatttttggctgtcattcaggctgtgacggaatttcttcctgtcagcagcctgggacatttatgcatattggaacaatatatgggaatcggtcacgaaaccggattgctgtcagaaacgatgctccatcttggaagtgcggcagcaattatatttttgttccgcaaagatttaaaaaaaatcggactgggacttctggggatgtttatggatatgatcggtaatctgaatctatatatccataacaagaagacaggggaaagtttgggctatgccagaatagtcaccggaacatatcggaaaacaggtgcacttcttgtgatttccatgatcccaacagcacttctgggacttacaggaaaacggctggctcttctggccgcggactctcagattgttccgggaatcggatttttacttacaggcgtatttcttctggtaacagatctgaataaatccggtggaaaaaagggaccgagagaggcttcttatgacagcgccatgtggattggaatttgtcaggggattgctgtctttccggggatttccagaatgggatttacgttatgtgctgcactgttatgcggatataaccgcaaatttgcggttcgtttttctgtttttatgagtctgcctgctatcataggtgctttttttacggaaatcggaaattttggtgcttctgaaatgacggcaggacttgggtttacctatgtatttgcaatgatcatcgccggttttgcgggatgtcttgttatccgaaatacaatagccatgactcagaatataaaattacgctattttgcatattattcatttatagtcggtattattacactggcattaaattttgccctgtaaagggaagatatttacgagaagatcaaggaggggagccttagaatggcagcatcaaagagtaagaataccgggcattcgggaagaaatacaaaaaagaagacagcaatggaacaggaagtcggcagatttcagacagaaatcatattatttgtgattttggccgcatgtgtaatcctgatggcaagcaattttggagcaggtggttttgtaggagatgcgatcagtaatttctgtttcggactgatgggactgatggcatatctgtttcctatcgtatttttccttgaagcagcatttattctgatcaacaaaacaaaccggctggcatataagaaacttgcagcggcgtttgtgatgtttctgtttctgtgtggggcagcgcagcttctcacagacggatatatgcagagtacaactttgctggattattatgctttaagcgcagattataaaacaggcggtggtctgatcggaggagcgatctgtatttctgtcacatctgcttttggaactatcggcggatatgtgatcattatactggcatttgttgtatgtatgatcattatcacacagcgctctctgcttgattttgtaacgcggctggttataaaggtgtgtgattttgtaaaagacagacatatgcgctatatgcaggggcagcctgaacgtgagcgatatagagaagaacgtgccagagaacgtcagcttataagagaacagcggcgtgaagaaagagtccgcagactggaggaagaaattggcgatgatgaattttcagatgatgactttctcatggatccttcggaagcaaaaaaaatgaaaaaaggcggctttctggaaggaaccaagctgacaggttattctgaacagaagccaaagaaaaaggggaaacttctgaaaaaagcagcagatacagataaagcagcagcagaaacagccgaagctgcggaggataccgagaatacagggattaaatcctctgatgatgcggataataaaccatacatcgatgctccgatgaattttgagattcacagagcggatacattcccggatacatacgaagcagataatgaatcacaacagcaggaagaccttccatttgaagatgctgtcactgaccggaagaaatctgtggtttcagaaccggaggaagatctgcccccttttcaggatgagaaggcagtgcggccgccttcgaaaaaccccaaatcttctgaaaaggagatacagagcggaattgtaaacattcagcatgagatcacccgacaggaagcagccgtaaaaaaagaatataaatttccagccttaaatctgctgaagaaaggaagcagcaaagctcagggggattctgatgcctatctgcgtaagactgcaaaaaaactccaggaagtacttcacaatttcggcgtgaacgtgactgtcactaatgtgagctgcggaccaacagttacccgttatgaacttcagcccgagatgggagtgaaggtcagcaaaattgtaggtcttgcagatgacatcaaactgaatcttgccactcctgatatccgtattgaagcaccgatccccggcaaagcagcagtgggcattgaggttcccaataaagagaacagtacggttatgctcagagatctgctccagtcagaagaatttcagaaggcaaaatccaaactttcttttgcagtaggaaaggatattgcaggtaagactgtagttgcggatattgccaaaatgccacatcttctcatcgcaggtgcaaccggttcaggtaaatcagtatgtatcaatacacttatcatcagtatcctgtacaaggcaaatccggatgaagtaaagcttatcatgatcgatcctaaagtagtagagctcagtgtgtataacggaattccacatttgtttattccggttgtgacagatccgaagaaagcagcaggcgcattaaactgggcagtacaggagatgacaaaccgttacaatacatttgcggagtacggtgtccgtaatctggatgaatataatagaaaagcagagcagatcaaggcggcaggagctgaagaagaacctgtgaaaatgccgcagatcgtgatcatcgtggatgagcttgcagaccttatgatggttgcgcccggagaggtggaggatgctatctgtcgcctggcccagcttgcacgtgcggcaggtatccatctgatcattgccacacagagaccgtctgtaaatgttatcaccggtctgatcaaggcgaatatgccttctagaattgctttctctgtatcttccggtgtggattccaggacaattctggatatgaacggagccgagaagcttcttggaaaaggtgatatgctcttttatcctcagggatatcagaagcctgcaagacttcagggtgcatttgtatctgatgatgaggtaagtgctgtggttgaatttcttgcagataaaaatccgggtgtccagtataaccaacagatcgagcagcaggtaaattctcctgtaacaacaggtatgtccggagatgaaagggacatccattttgaagaagcaggtaagtttatcatagagaaagagaaggcttctattggtatgctacagagaatgtttaaaattggtttcaacagagcggcaagaatcatggatcagctctgcgacgcaggtgtagtgggaccggaagagggaacaaaaccgagaaaagttcttatgtctatggaggagtttcagaattatctggaaaatcagtaagtgaggactgtctatgaaatgtcctaaatgtcataaagaggtggaaaaaggctctctgtactgcccctactgccttgcggagataccctgggtaagagaattcagcacagtggaaactctgatgaaaaaggagcagcagaaccgcccatccgaaaaaaaacagaaaacaaaaattataaaatatttcaagcatccaaaaagaagaaagctgaaattcagcagaaaacagcttctatgtctgcttctgtgtgcggcgacactgctggggttcttttgttatcggcagttaaatactttttctgccttatattccagggcaaaaaaacaatatgcacagcaaaactatgaagaagcacagcggattgcagaaaatgctctggataaaaatcccaaaaatgaagccgctaatcttcttctggccaaaagtatggagaaatcaggcgataaacaatctgcacttcttgttttgcgcccgtttatccagaacaaaactgcgggaacaggaatatataaagagtatgtgaagcttcttacacaggagggaaagaccaacgaagtcagactgatcctgaaatctgctgacagagaggtgcagaatgcctgcgcagaatatatctgcgaaacacctgtatcaaatcctgcccccggaacctatactacaacgcagactctgaaactggaaggtaactgccaaaagatttattacacattagatggaagcacacctaccagaaagagtaaagtatatacagaacctattattctgagggaaggcacaactgaattaaaagcctttggtgtaaatgataaaaacatcgaaagtgatgtgatcagcagaaagtatgtgattgttttaaatgcaccgaaagcccctaaggtaacacctaaatcaggggattacaataaaaaaacagagattaagatcactgttccggatggatgtaaggcatattatgcatttgattctgaaccggatcttaacagtactgtttatgaacagccaatctccatgcctgtgggttaccataggctgaatgttattcttgttgcagcaaatggcaagaccagtaaaatgactgctatggaatattatctgcagtactaaaaatactgtgattttatcgctgattttattaaaatagaaggaagaagatcatggaaatccgtattgttacagttggaaagatcaaagaaaaatatctgtgtgacggaatcgcagaatatgccaaacggctgagcagatactgcaagctgactttctgtcaggtagcagatgaaaaaacaccggataaagcgtcagaagcactgaacacacagattaaaaatacagaaggcgaacgtctgatgaaacatatacgcgaacaggattatgttatcgcactggcaattgacggaaaaacgccggattctgtagaactctctcaaaaaattgagaaactgggagtttccggtatcagttccattgcatttgtgatcggaggttccttaggactgagtgagagtgttctgaaacgtgcagattataaactcagcttttccagaatgacttttccgcatcagctgatgcagatgatccttttggaacagatatacagaagctaccgcattatgaatcacgaaccctaccataaatgaacgaatgtaccaacaagtccaaaagaaagaagaaaactatgaacacagaaaaatttgaagaattcatttcacagtacccgatttttgaataccgcatactggacacaaaagatattacaattcaggaacgcgtacgcacgatctgccaagaagaatgcgaacgttatgattctacttgggcctgtccccccgcagtaggaaccctgcaggaatgtgaaaaaaaaataaaaagttatcctcaggctgttttcttttccagtgtagcggaagtttcggatatcatgaacatggaagaaatgctttctacaagacgggcacacgaggacctgactacagaggtgggaaaatatctgaataaagaagggtatgaaacttatatcctgtctacagaatcctgtgatatctgtgaaaaatgtgcctataaagagggaaagccatgcagatatcctgatcggatgcatccatgtctggaaagtcatggtgtagtagtaaatgagattgtagagcgtgaatctatggaatataatctgggtggaaatacaattctgtggttttctatggttttgtttcgatgattgctgctgaaacgtgttttaaagaaagttcttccggcatagactgatagtaaaagccgggggagctttttttatgaaaaaagcaggacaatggaaaaaccggatggtgctggcattagaacttccgcctgatctggcatataatgaaacgatcgtcacactgacaggtcagacggaagctgttatcgaaaattacaaatctgtttttaaatatacaccttctgaaattgtgatacagtctttttgcggaaaagtgaccatatccgggaaaaatcttgaaatccgctggtacaattccagtgcaatgaaagtgacgggaagtatttatgatataaaagcgggtgacagcgaatgttgaaatttttgaaattaatatatggttatgtgatcatccttgtaagaggagaaaatctggaacgctttctgaatctctgcaaaagcagaaaagtttatatggaaaagatccggtacagagaggacggccagcttatggcacaaatgcaggccgctgatttctttcgcctgagacctctccggaataaaacaggtgtacatattcagatcatacagagacggggaatgcccttcttttttttaaggaataaaaaaagaaaggctttttttacaggcatgattctgggaggtatcctgatattttttttgacagggagaatctggaatatccatattgaaggaaatgtcagaaacagtaccggagaaatcctcgattttctggataagcaggatataaaccatgggatgtccaaaaaaaagatcaactgttcagaagttgcagcaactgtacggaaaaattttccggagattacctgggtatctgccagaatagaaggaacccgtctgattcttaatatccaggaaggaattatcccccaaaaaaccaacagtaatacctcaccctgtaatctgctcgcagacaaggacggagtgatcacagatatgatcgtccgaaggggcataccggtaaaaaagcccggggattcctgcaaaaaaggggaacttctggtatccggggaacttcatatcatgaatgacagtcaggaagtcctgcgaaaggaatacgttcatgcagatgcggatatttttatttccagacaaatttcctattatcaggaatttccattaaaataccgtacagaaatccctgccggcaaaaagaaaaaagaaatgtacttccggtttgggcactggtatctgggattgtatccgacattacatacaggtcagaaacgtatcacagaggaaattcctctgcgtatcacagaaaattttatacttcctgtatggatcggatggaccgaaactactgattatacagtaaaagaagaaacctataccaggaaaggagccgagaaggaagctgtgcgaagatttcatcaatatgaaaagaagctgcttcaaaatggcattaagatcagtgaaaatcatattactaccaggctgacagaatctctgtgcattaccggaggaaccctgcttatcatcgaacagacaggcgaaaaaagccggataacataaaattccataaaaatttgtatttaaaaagttgcagggaggtgttacaatggatgcatctggttttaaccggactttgattatcgtccataaacgaggcaataatccattattaacttatcaacaggaaaggacatcacaggatggctggcaatattattgaattacacacagaagtccccgcagaactggaagcaaatgtatttggccagtttgatgagcatcttaagctgattgagagaacactgaatgtgacagtgatctccagagacggaatccttaagatacttggcaatgaacagaatgcggcttctgcgaagaaactgatagaagaactgacagtacttgcaaaaagaggcaacacgatcacgaaacagaatgtcaattatgctctttctctggcaatggagcagagaaacgaagttctcacagaaatagacaaagattttatctgtaacaccatacagggcagacctatcaagcccaaaacactggggcagaaagattatgtagaacagatacgcaaaaaaatgatcgtgttcggtgtaggtcctgccggtaccggcaaaacctatctggcgatggcaatggctgtcacagccttccgaaatgaggaggtcagcaggatcatcctgacacgtcctgctattgaggccggtgagaagctgggatttcttccgggagatctgcagagcaaggtagatccttatctgagaccactctatgatgcactgtaccagatcatgggagcggacagctttgcgaaaaatatggagcgtggcctgatcgaggttgcaccgcttgcatatatgcgcggacgtacactggataatgcatttatcattctcgatgaagcacagaatactactccggcacagatgaagatgttcctgacacgtatcggatttggttccaaggttatcatcaccggagatgcctcacagaaagatcttccaagagatactacatccggacttgacgtggcaatgaaagtactgaaaaaaatagatgacattggcttctgccagcttaccagcaaggatgttgtccgtcatcctctggtacagcagatcgtacaggcttatgatgcctatgagaagaaacaaaaacctgaaagaccggcaagacgcagaaacggggtaaatgaacgatgaacatgcagattgattatgagacagagcgtgaactggggatcgactatgagacactggcagtaaaggtagctgacaaggttcttgaaatggaaaaatgtccctatgatgcacaggtgaatcttgtacttacagataacgaagagattgagagagttaatactgagtttcgcgatatcgcaagacctacggatgttttatccttccctatgattccttttgagacaccggcaggatatgatattgtggaggaagatgaatcttactttgatctggatacagacgaacttcttcttggagatatcatgatctcagttgacaaggtatttgcgcaggcagaggaatacggacacagtgtgacaagagaattctgttttctggttgcacacagtatgctgcatctgctgggatatgaccatatgactcccggggaagcggcagtcatggaggcaaaacaggcgaaagccctggaggagcttgggattacacgctgatcttcaaattctgttattgcaggcaatttctgatggattttgtctcgtaactgtaaagacactgaacagttacaaaaatatatttatatggagtaacaaaaagatgaattaccgggaacgacttaaagataaaaaacgtattgtaattaagatcggttcttcttccctgactcattcggagacaggaagactgaaccttcgcaaactggaagtgctggcaagagagctcagtgaccttcgcaatcagggaaaagatgtcatactggtttcttcaggagctatagcaacaggtgtggcagctcttggaatgcatgagaaacccacagaactgaaaggaaaacaggcatgtgcagcagtaggacaggccagactgatgatgatttatcagaaacttttttctgaatataatcagctttccgctcagatccttatgaccaaaaatactatggttaataatgttaaccgaaagaatgctcagaatactttcaatgaactgctcagtctgggagtgattcccattgtaaacgagaatgactccatttccacctatgagcttcagaatctggagaaattcggagataatgatacattgtctgcaatggttgccgcacttgtacgggcagatctgctgattctgttatcagatattgatggtctttttacagatgatcccaatactaatcctgatgcaaaattcattgatgtggtagaaaatctggatgataatctgcttaacatgggaaaaggtacttctggaagtaaggtaggaaccggcggaatggctactaagctgacagcagcacagatcgcttctgcagcaggcgtagatatggtgatcgcaaacggagccgatttccatattatccataagatcacagagggacgcaagtacggtacgctgtttgtaagccagtccaaagaagaagtttatctgatcgatattattgacagactgttataataccggaaatttaccggtgccaaatgacattcacagagtaaatggcagtgtttacagacagactgccgcagacaaaaaacaggaggaagaactatggaagttgagaaaatcgaccgcattaatgcacttgcacataaagccaaaagtgtagggcttactgaagaagagaaaaaagaaagagaactgctgcgcaaggaatatattgcatctgtccgtatgaaccttcgcgctcagctggacaatgtggatgttcagcaggaagacggaacaatcattaatctgggtgaaaaatatggaatcaaaaaaagacattagaaagaagattttcgcagaaagaaagctgcacacagatgaacagatagaggcaatgagccgcacgatcactgacaaagtgaccgcacttcctgcatttaagaatgcggaccgcattctggtatatgcagattacaaccatgaagttgtcacagagtatcttataaaagaagcatggaaggccggcaaggaggttgcagttcccaaggttgtgggaaaggatatggtattttataagctgacagacttggcccggctggaacccggatattttgggattcctgagcctgtatcgggggagattgtcaactggtcaaaggctcttatgatcatgccgggagtggcttttgacagagcaaatcacagagtcggatacggtggtggcttctatgaccgttatcttgagaaacatccgcagcttgaaagagttgccattgcattttcttttcagatgttgccggaggttcccacagaacctactgatatttgtccgcagatcatagtaacagaagaggagatatgctatcttactgactgaaaggggacctgaacatgaatgaaatgctgaaccgccttggcatgaatgcgaaggcagctgaaacagaaatgagaaatctttctacaaacaaaaagaatgaagtacttcttgcagtagcagacaaactggtaaaggatgcacagactctgatcaatgccaacaggctagatgtggaaaccggaaaaaggaatcatatgcctgaggggctgatcgacaggcttcttctcacagagagcaggattgaaggaatggcagagggcctgcgccaggtagcagccctggatgatcctgtcggggaagtaaccgggatgaaaaaacgcccaaacggactgctgatcgggcagaagagagtacctcttggcgtgatcggaattatctatgaagcaagaccgaatgtaactgcggatgcatttgcactctgctttaagaccggtaatgtagtaatcctaaagggtggaagtgatgcgatccattccaacgaggccattgtaaactgtatcagggaaactctgaatgaacagggcgtgacagaggatgcaatccagctgatttctgatacatccagagagacagcagcagaattcatgaagatgaaccagtatgtggatgtactcatcccgcgaggcggcagaggcctgatcaaagccgtagtggagcagagcaccatccctgtgattgagaccggtactggaaactgccatatttatgtggatgaaaccgcagaccttgagatggcagcagacattatcatgaatgccaagactcagagagtaggcgtctgcaatgcctgcgaatctgttcttgtacataaaaatgtaaaggatgccctgcttccagtccttgcaaagcgtctgcaggagaaacatgtggagatccgcgcagatgaagcggcttatgcgttgatcccgggagctgtacacgcaacagaagaagactggggcaaagaatatctggattatattctttctattaaagtggtttcttctgtggaagaggcgatcgctcacatcaataaatataatacaaaacattcagaggcaattattaccaataattatgaacatgcacagaagtttctggatgaggtggatgctgcggcagtttatgtcaatgcctccacacgttttacagacggatttgaattcggtttcggggcagagatcggtatcagcacacagaagcttcatgcgaggggacctatgggacttctggctctgaccacaacgaaatatatcatctatggaaacggacaggtacgcccatagacagcacattgattttttctgagggatgtgctatacttcaattcagatttgggattactgactgcttcgtggggaataagaaatcggatggtgtcagtagtgattttaactaaaactcatctatgggaggacatacaatgagaaaaaaacaactttttgcattattaatggcaggtgccctgtctgtaggaatggcaccgacagccacatttgcagcagatactgctgctgagacatcagccgaaggtgaacttgactcttcagatacagaagaaccttctgaagatccggctgaaactcctgaggaaccagccgaagatccagccgagactccggaagatccggctgaaactcctgccgaaacaacagctgatcctacagaggcaccggctgctgaagaaactgatgagcaggctgctgaggcaggttctgcgattgtgattggcgaaaagtcctttacttctctggaagaagcgttcgcagcagtaccggactgtgaggatatgataaatggtgagcctacttatgtaaaattaaaaggaaccattgaagtcaacaatacaataaatgtccctgaaaaaaagaatatcatgctggttgctgctgaagataatactacgatcaaacgtgcagcaggctttactgagagtatgtttactgttaatggtggtaatcttcagatggcaggcggttctgtgactgcttcagatggaaatgctatcggttcaggcagtttaactgttgagggtacaggcgatggcgttaccggttcgattgtagaagtagtaagcggtaattatgcattgattgacggtacaactctgacaggaaataccacaaccggaaatggcggtgcggtcaacaatgctgccggtgcaaatgtatatcttctgggtggtactatcacagcaaactccgcagcagcaggcggtgcaatttacagtgagggaactgtcaatattcgtggaactgtaagtgttacaggaaatacaattacaaattcttttgaagctgcaagtaaccttgtgcttgccaaagatggtgtgatcaatgtaagcggtgctgttacaggttctgccattggtgttgctgttcaggaggctaacgccggaagaacagtcgtaaagctgggtgacgctgttactgatgtgaaactggcggatgttctttctcagattacatatgagggagattccagccttaaaatcggagaagacggaactttagtcagtacaacagaaccgtcccctaccccaactcctgcagaagaaaaactgaaagtaacaggaaaagaatgcaaatggtccggaagtggtactgttaaaattaagttccagtcaaatgtaaaaggtacctattatattgactgggtaaaacgtggtgagaaagcaccaacaatcgatacttccagagtaggcgcgcctattgaggctgatacaaatgtaacagcaaaagttactgatcttcctgactatgatgttgatatttatgtatgtgtgatcagtgataaggataagagtaattatggctctgtaatgttccagcctgattcaaaagaacgtcctgttacacctacaccatctcatactccagtagtacccgatgtaaaagagagtgttgtacagggatttgagaaagcacttgtgttctatccgaatactttctatgacttcaaggtaatcggtgcaggtacacaaaacaataatccgggagaaggtgatgtcagatgggtacctgtaggatggagtatgtcttctaacccgtcaacctggaacacatcctggaaaattggtgccaagagcggtatttatacagatgccgagaaagcatatactatttacattaaatatgcaaaacaggtatacagcggaaatgactggcaggaaacagatgcttccgaagttctgccctatcagttcaaggcagctcctctgacacaggccactaccacaccaggtgcaaacggaacaaacggagacggaaccggatccggcgacggaactacagatggaggaactacagatgtaactccgacaacctatgcagacggaacaaacggaacagcgaaatcagcagtatccacaggtgatgaatcaccgattggaactatgctggctcttgctgcagcttctgttcttgcaggtggttacgtactgataagaagacgtaaaaaagaaatgtaaatataatccaattatttttaagagacaggtcttatggcctgtctcttttcatatatataataataaggcagccattcgtccatacaagtcagaatccgaaatctgatccaggctgctgaacatttgccaaaaaggaggatagaatgtatgtcaacagaacagatgggaacttatgaaaaaatatacttcgcattgtgggaactcggacagagatatggaaattttgtccagttcagagtgatcggaagaagtcatgatgacagaatgatccccatgcttgagattggaaagggtgatacctgcattatctgtctgagcggagtggaaagcggagacagaaatctcccggaatatcttttgtccattgcaaaagattactgcagatcctatgaaagcaactggaccatcggagaaagttatgaagttcgtaaacttctggataaggttcgtatctgtatgattcccatgctgaatcctgacagctatgagatatgcgaatatggatatggtgccatacataatcccatccacagacagatgctgaaaatgcaggacaggcctgtggaagagtatgaatgtaatgccaggggaattgatctgcgcagaaattttccgactaattattatcagcggaaaagagtgaatcaggagcctgccagtgagaatgagactcgtgccctgatcagcatttttcaggaatattcaagccttggcctgcttacattcagttattccagagggaagatcgtttactgcagacaggagaaaggctttgcctacaatcagaaaaattacagactggcaaggcatttacagaaatgttccggctatcgtctggaaaaagggattgcaggtggtgcgagagtcaaaaaagccggagcaaaacctgagatgggatctccggaacagttttatgcggaagtaatccgtcagccctctctggcaattgagattccggaataccgcaaggacgatatggaagaactgcgtctgattccacttgaatatctttattctttaaacagcggcatattggcaaacgcataaatccgtcacacagtcaaagaaaaactgtatccgaaaataaaaagtaataaaaacagagattagcgtttgacataaagccatagattctgtatgataaaaagagtgccccgaaatgttgtaaacagaaagatgaggaatcaatagtgaataataatacacaggaaagtaaaatacagttagaatatatcaataaatgtacagagcttgtgaaggaaaaatatgaaaatgcgccagctttctttatccagaatgcaggctgccagatgaattccctgcagacggatacagtggccggtatcgtgaaacgtatgggctatacagaagtatccagagaagaagatgcagatgttgtcatctataacacctgcacagtccgggagaatgcaaacctgaagatttacggtcatcttggccatctgaaaagtattaagaaaaataatcctgaactgaagattatattgtttggctgcatgatgcaggagcctgaagtaattgagaagatccacaaagaatattcttttgttgatctggttttcggtacccataacttccataagtttccggagcttttctacagaagcttaaatacggagggacagatcattgatgtctggaaggaatctgatgagatcgtggagggtatgccttctgaccgtaaatattcctttaaaacgggtgtcaatattatgtttggctgcaataatttctgcagttactgtattgtaccatatgtaagaggaagagagaagagtcgcgaaccggaggcgatcatagaagagatcaagggtctggtggctgacggtgtaacggaagttatgcttctgggacagaacgttaattcctatggaaagacactggaacatccggttacttttgcacagcttctgagacaggtggaagcaattgaaggattaaagagaatccgtttcatgacttcccatccgaaggatctgtctgatgaactgatccggacaatggcagagagcaaaaaagtgtgccatcaccttcaccttcccatgcagtccggaagcagccgaatcttaaagatcatgaaccgccgttatgacaaagaaaagtatctggaacttgtagacaagatccgtaatgccgtaccggatatttcccttactacagatatcattgtaggttttccgggagaaacggaagaggatttccaggatactctggacgttgtggaaaaatgcgattttgattctgcgtttacctttatttattccaaaagaagcggcacacctgctgccaaaatggagaatcaggtacctgaggatgtagtaaaagaccgttttgaccgtcttctggctctggttcaggaaaaaggccgaaaggcttcttcccgtttcgagggaactgttcaggagatccttgtagaggaagaaagcagagaaaaaggtatctttacaggaagaacagaatataaccttctggtccatttcccgggatgtcaggatctaatcggtaaatatgtaaaagtaaaactggatacctgcaagggattctattatttcggaagccttgcagaataaaaatgatggctgtttctgaacagcaatataaaggacttctacagaagcccatatcaatttggatatagagggtggaagataaaagtgaaacaaaataaatacgaaatagatatgtgtaacggaaccatcatggacaagctgatttccttttcactgccgctgatgctgtccggaatcctgcagctgatgtttaatgctgtggatatcatagtggtgggaagatttagcggaagtcaggcacttgcagccgtaggctcaaccacagcactgatcaatgtgtttaccaatctgtttattggtatctcacttggtgcgaatgtacttgctgcccggttctatgcggcaggaaaagaccgggaaatgtcagataccgttcatacggctgtaactcttgcactggtaagcggtatcgtcatggcatttgtaggactgattttttccagatgggctctggaactgatgggtaccccggatgatgtgatcggacagtctgcactgtatatgaaaatctattttctgggtatgccgttttttatgctttataattatggagctgcgattctgcgggctgtaggagatacgaaacgtccactgatctttctggttatttccggtgttgtaaatgcagtactgaatctgatcctcgtgatcatgtttcatatggatgtggcgggcgtagccattgctactgtgatctcccagttaatttcctgcattctggtactcagatgtctgcgtacatcgaaaaccagctaccagcttcattttggaaaattaaggatcaatactgtttacttaaaacagattttccaggttgggattccggccgggatccagagcacagtcattaatctgtcaaatgctctgcttcagtcctcggttaactcctttggatcgaccgccatggcagggtatacggcggccaataatattttcggttttctgtatgtggcggtgaactctgtcacacaggcatgtatgagctttaccagtcagaactatggtgtgcataaatttaaacgtatggataaggttctggtcgactgtcttattatttccgtagttacctccttttcccttggatgcggtgcatatttcttcggttctgagattcttaagatttatactgccgatccggaagtgatccgctgcggactggaaatcctgtcttacactaccgtaccttattttctctgcgggattatggatctgtttccgggtgccctgcgtggaatgggacattccggcgttccaatgatcctgtcagtgatcggaacagtaggaaccaggatcgtatggatatttggaatattcccgcatcacagatcactggctgttctgtttatttcctatcctgcatcctggatgctgacgatcattatgcaggtcacctgtttttattttgtcagaagaaaagtgcatagagtataggtctttgagcttttgcgaaaaataattaccggcagaatattaccggcggttattttctgtgagagctcttttttgtgttactgctgcttactctgtccacagtaactaatctttttgtttccgatatgaaaaaacagtattgacaaataccccataagggtatatagtgactactgtaaagataccccgtaagggtattttgaaatcgttatatgtttcagaaatttatataaaacagagcttatttataaaaatgtactctcggagtctttattgcacttgcttttatggctgatttttcgccagatgcacccgcattttatcaacgtacgcaccgcgtacgcctcaaaaattcgggcacatctgacaaaaaatcttctcataaaatcaagtacaaaaagattccgagagtacataaaaatcagaaggaggatttcccatatggcagatacacaggagaaaaaagtctgtccctgctgcacaaaacacacaatgcgttctgaggaggagagaaagaagctgatcaatcgtcttaaacgtgtggaaggacagatccgagggattatcggtatgctggagaatgatgcgtactgtaacgatatcctgatccagtccgcagcagtcaacgcagcagtgaacgcatttaacaaagaactgcttgccagccatatccgcaactgtgtggcaagagatatccgcgagggcaaggatgagacgattgatgagctggtggctactttgcagaaactgatgaagtgaaggctgtgtgttcagactattatagcatcagagtacagcagaataaagatctgggaactgcaaagcaacagagcagtagatatcaggtaaggaacaacaagtcgtaggaggaatagaaatggaacaatacaatgtaaccggaatgagctgtgcggcctgcagcagcagagtggagaaggccgtatccagggttccgggtgtgacatcctgttcggtcagtctgctgaccaactccatgggagtagagggaactgccggttcaggtgagatcatcaaggctgtacaggatgcaggatacggagcatccttaaagggggcatccggggagcagatatctgcttctgcggcagaggaggcactggaagaccatgaaacaccggcactgaaacgaaggctgatcgcatctgtaggctttctgcttgtgctgatgtatttttccatgggacatatgatgtggggctggcctcttccggcatggtttaatgataatcatattgccatgggactggtgcagcttcttctcgccggaatcataatggtcattaaccagaaattttttatcagcggctttaagagtctgtggcatcgtgcaccaaatatggatacccttgtggcacttggttccatggcatcctttttgtggagtgtttatgtactttttgcaatgacaagggcacaggtggacggagattctgcagcagttatgaattacatgatggagttctattttgaatctgccgccatgatccttaccctgatcacagttggaaaaatgctggaagcccgatctaagggaaagacaacggatgcgctgaaaggtctgatgaagctggcacctaagacagcagttgttgtccggaacggacaggaggctacggtgcccatcgaacaggtccgaaaaggtgatgtttttgtggtacgtcccggtgagaacattccggtggacggagtggtccttgagggaaacagtgctgtcaatgaggcggcacttacaggggagagtattcctgttgacaagaatccgggagatgcagtctctgctgcaaccgtaaaccagtccggatttatcagatgcgaagctacccgggtaggcgaggacactactctttcccagattattaagatggtcagtgatgcggctgcaacaaaagcacctattgccaaaatcgcagacagggtttccggagtttttgttccgacagttatcagtattgcggttgtcaccaccattgtctggctgctgacaggaaaagagttcggatatgcacttgccagaggtatttctgttctggtcatcagctgtccctgtgcccttggacttgccacaccggttgccattatggtaggaaacggaatgggagccaaaaacggaatcctgtttaaaacagcagtatccctggaggaagcaggtaagatccagatcgttgcattagataagacaggaactatcacaaagggtgaaccgcaggtgacagatatggttcctgcaaagggaatctcagaggaagagcttttaggctatgcctatgcacttgagaagaagagtgaacatcctcttgcaaaagccattattgccagagcagaagagaaaaagattgttttgcagaaggtttctgattttcaggctcttcctggaaacggtcttcgtgcagcattaaacagtgatgtgcttacaggcggaaatatgaaatttatcagcaatgaaacctctgtatcaccggaactgatgaagcaggcagaaaaacttgcaggagaaggaaaaacaccacttctttttgcaaaaggcgggaagcttctcggcatgatcgcagtggcagatgttataaaagaggacagtcctcaggcaataaaagaactgcagaacatgggaatccgggtagtaatgcttaccggtgataatgaacgcacagcaaaagcaatcggagcacaggcaggagtggacgatgtaattgcaggtgttcttccggatggcaaggaaagtgtgatccgttctctgaaggaacagggaaaggttgccatggtaggagacggaatcaatgatgcccctgcacttaccagggcagacatcggtattgcgatcggtgcaggaacagatgttgccattgatgccgcagatgtggtattaatgaagagccggctcagtgatgtacctgctgccatacgtttaagccgggcaacattgagaaatatccatgagaatcttttctgggcattcttctacaatgtgatcggtattccactggcagccggtgtatggattccgattttcggatggacactgaaccccatgtttggtgcagctgccatgagcctttctagtttctgtgtggtaaccaatgcactgagactgaatctctttaaggtacatgatgcttccagagacaaaaaaataaaacagaatgtggaagaaatccattacatttcagctaatgcagaaatgaaaaatgtaacagaaaacaaaagtctaaaggcagagaatccagacttttgcaacagtgaaattcatgatccaaaagatcaggaaaatataaaagaaaacaaggagaacaaagaaatgacaacaatcacagtaaacgtaacaggaatgatgtgtggacattgtgaagcacatgtgacaaaggcagtaaaagaggcatttggagtggaagatgtagtttcctcccatgaaaaaggaaccacagtgatccatgctccggaaaaactggacgaggataagatccgcgaagtgatcaaagaagccggctatgaagtaaccggtatcacacaggaataaaaaacaaaaaggggattttatggaaaaccagaaccagacaccacataaaaggcgtgtccgttataaaggaaaatatccgaagaaattcgaggagaaatacaaggaattacagcctgaaaaatataaagataccattgaacacgtgattcagaaaggaaataccccggcgggaatgcatatctccattatggttaaggaaatccttgattttcttaatatccagccgggagaaaccggatttgatgccacattgggctatggcggccatacgaaagcgatgcttcagtgtctgaatggcaagggacatatttatgcaacagatgtagaccctgaggaatccgccaaaacaaagaaacgtctggcagagcagggattcggggaagaactgctgacagtaaagcttcagaacttctgcaccattgatgagattgccaaagaggttggaggatttgactttattctggcagatctcggtgtttcatccatgcagattgataaccccaaaagaggtttctcttttaaaacagacggacctctggatctgcgcctgaatcaggaaaccggcatcagtgcagcccagcgtctggataccatttccagagaggagcttgcgggaatgctctgtgaaaattctgatgaaccatactgtgaggaactcgccaaagccattaccgatgagatccgcagaggcaatcatattgatactaccacaaaactgcgtcaggtaatcgaaaaaactcttgatttccttcctgaaaaggaaaagaaagagacaattaagaagacctgccagcgaaccttccaggcattgcgtattgatgttaaccatgagttcgaagtactgtatgaatttatggagaagcttccggatgctttgcgtccgggcggacgagtggcaatccttacctttcattccggtgaggacaagctggtaaagaaagctctcaaggcaggatacaaagatggaatttattctgactatgcaaaagatgtgatccgcccctcagccaaagagtgcacacagaacccaagagctcgttccacaaagatgcgctgggctataaaggctgaataaagttctaataaatgtttgtgaattactcggtaactgagttaccagagcatctgaaaaaaggcgggataccgccttttttcatggtgcatccatggcgccactactgtttgctctttagagctatacagctgcttttattatttcaggtgttttcagtccggttacggacagttcttttgcactgtccactgtaagaaatcagataacacaggaaagtatacaaagttgcattattttatagaattgctatgaactatgaacaattgacgtattttgtaaacaaaagtatactatgcttattaaaagaacgaaggaaagaagcccggagattacacctgacaacagaggagtaatatggggaaaggaattgaacggtatggctactgatgaagagctttatgggcaatatctgagcggtgacgagacaggacttgaactattgataaaaaaatacggcgacccattgaccttatacatcgatggttatctgcatgatgtccatgaagcggaggacttaatgatggaaaccttttcctggctgtttacgaaaaagccccgcatccgggatggatgttttaaggcttatctctataaagcagcgcgtcacatggcattacgccacaaaagcagacgacggattatcttcagtcttgacgacctgaccagagaaccggaggcacaaacgctggtggaggagatcgtccgcacaaaggaacgaaatcagatcctgcatctctgcatggacgagttaaattcagattatcgggaagctctttatctgacctattttgagggtatgagctatcaacaggctgctaaggtcatgggaaaaagtgtgaaacagatcacaaatatggtgtaccggggaaaagagcgtttacgcggattattgcaacgggagggtattacagatgttgaaaaatgaggaacgaattgctgaagtaaaacggcgtattggggaaaaagaacgacagcagagactgaggcacagacggattgtctccgcattctgcatagcggcatgccttgcagtaatcgttggtgtttcctttgtcatgccaggtattgtcggacagattgagcccggtgcttcttccggctttgaaacagcagcaacaattttaggcggcggcaccgcactgggatatatggtgatcggactgctcgcttttattctcggcgtgtgcgtgacggttctgtgcttccgcatccgccagctggacaaagaggagcagacggaggaacaaaagggggacaatggagatggagctgatcaataatctttttcaattcgctgtcaccctgctgggcttttgtctgagtggtatctggtatctgaaagatcgaaaacagacctgtttcctgctgacctgtttttacggctgctttgcccttggctctctttactggacgctgtatctgcttctgttttctgaaacgccgcaggtcttttatgtgtcagagttcggctggatagccagcgtgatttttctttatcttctgcaatacaccctttcttctgcggaggaaagagacttttcgacacggaaatctctgatagctcctctgattggcattccgctttgtgtgttttactgtacctttggggatgttctctccaatttgctctggtgtagcatgatgatcgttgtttcttatcattccatcagagggcttatttatgctctgatacagacgggaacggcacgtaagatccggtattttcacattggggtgctgtgctatgtggcggtggagtatgctctttggctctccggctgtctgtggccgggttattccatttccaatccctattgctggtttgatcttctgcttacaggctgcctgttcgcactgctcccggccacaggaaaggcggtgcagacatgacctatattgaaaatgtatttctctgcattgcttcgcccctgttgatcgcggctctgtgtatgggaaagcggcagagaaaattctttctgttctgccttgccggaatgggtgcctgtctgctgtctgcttacatcaacaccttttttgccgcactttatagagcggacacctttaccactactacagagatcgccccggtggtggaggaagtgatgaaatttctgccattgctcttttatctgctgatatttgagccgaaaagagagcagataaaaaatacagctgtagttatagctctttcctttgccacatttgagaacgtctgctacctgatccaaaacggagccggacatttttcttttattttcttccgtggtattgggactggagccatgcatgtgatctgtggagccattgtcggcggtggtcttgcatatgtgtggcagagaacatggctgaagattgccggaacctgcggtctgctgggagcagcaatcacttttcacgcaatttataatcttctgatcgcctatggcagtgcagcacagtatattgcttatctgttgcctgtactgatcctggcagcgggaaaactgatcttccgcagttcaatacaataatataacctgattttccgcttttgggagctgtttcggcagctctcaaatttttttgaaaaaatttgattttcaggtgagagtttttcgctttttttgtacctatataagtgaaagactttttaggacttttttgtgaaaggaggatggaaggcatgtatgatacagaaaagcgtatcgaattggtaaaaaaacgaatgcatgaataccaccgccgccaggagcggcgcacagtctgccggctgtctgttctgtgtaccctgttgttcctgtctctcgtgggaacaatggggatgatgcaaagccagccaatagacatcacgggaatgtacggcacaatcctgctgcatgaggacgcaggcggttatgtgttggtggctgtcatttcctttactgtggcagtcgtgattactgcattatgtatcaaattcagaaaaagaggacaaaagagtcaagacgtagaagatcatgtattaaagaaaggaaaggtggaagtatgaagaaaaagtgtttcaaaaaaactgtttcatgggcattgagtatcgttatgtccgcaacgatggcggtaactccggtattggcagacacttttactgatggtagtcagctgatcgtttccgaagatgcaggagaagagactccggcagctacaatatccgatgcagaagacgaaggtatgatggagccagaacatacctttgagatcgaagataactgcgaagattcaggacgtaccggattttccagcgaaaatgaggcaagcgggttttccgatgacagcgttctagctgcgcagacagaagaaaaagcggctgtttacctggatccgtcatctggaaacgatggtaatactggagagagtgctaagtctgccgtaaatactctttcgaaagccgtagagcttgcacaaggtggcgatatttttcttcttgattgtgtggaggtcgatagtgatatcaaactgagcaatgtgacatttcgccctggaaaaagcaatatgtcaggtatgctgtatataagtagaggtaaggtaacattagaaaacataataataaataataaaacaccggatggtaagtcttgccagttctctaattatcctattgaagtgactggaaggttggcaacattgactatagcggatggtactgagattggaccgttcccgggaaacagttgtattattgtatcacacgatagtactgtaaatctgaatggtggtaaaatcctgggagataagcagaacacagttgaatatggcggtggaatatatgcggaacatgcaactgtcaatgtgaatggaggtacaatcagtggacatagtgcaacgtatggcggtggaatattttcgtcttactcaaacattaaaataaacgggggtacaatcagtgataatcagtcaataagaggcagtggaatatatgcgataaatgattcaaacgtaagtttaaaaggaggcagtattattcataataaaagtggacagggcgcaggtgtctacttgtctatttctaaattgtttataaatggggaaagctgccagatcacccaaaatacagtaacaacagaaccttctcctaaagatatgcgcggcgaaggtggcggaatttatctgatttattctgaagcagaaattgaatctggaaccatcaacaaaaatacagccattgcagcagctcctgacgaaaacggtaatatccagggcggattaggtggtgcaatttcagcaaagtattcaagagtaaccatcaaaggagatacaaaaatccgtaataacagtgcgggtaaccgtggaggtgcgatatacacagagggaacgaacaatgattctagtctgcttaatatagaaggtggaactatcagcggcaatcatgtgaatggaagcggagccggtatattcgctatatgttctaggggaaacaaacataatatggatgtgaacatttccggtggaacgataacaaataattacagcggaacaggagagaatgaagaagaaaatgcgatcgtcttgatggggtgggatccgaatctgactgaagataccggtttcgcagatctgcatcttagtgacagtccggtaataacgggaagcgtaacactttcagatgataataattatgggcctcgtatatatgtaggtaaatctttgcaattatcagacaaacatattttggtgacacctacatatggaaaagctgatttaattgcggttgaatatgagaatgattcagcagctgaatcgtttgagtcacaattctattcaaatggtatgagcaaactggtaagagatggaaagtatttaaaatgggctctggtaaagccaaaagtccaagtttcagcggacaaagaaaaaggctgtccgtcttctaaaattgttttaacggcaaaggcaacgcatgtgcttgacgataaaggcattacgtacagctatcaatggtataaagatgatcagatcctgaatagtcagacaggagaaactcttacagtctctgaggcgggaacctataaagtggaggtaacagctacaagtcaagcaggagtgaattccacagagacagcatctattgtaattcctgcgtttgaacattcttattcctggcagtttgataaaacaaatcactgggagcactgcagcattggaaatgagaatacaactcaggaagcacatacatttggtaactgggtagtgacaaaacaggcatcaatcggagcagaaggagagaaggaacgaacctgtacggtttgtggatacacagaaaaagaaacaatcccatcgatctacatcccaagctaccctgtaacaggtatcaaggtatctcaggacacccttatgcttacaaagaaggacgagactgcacagctttccgcggaagtggttccatcatatgcagataatacgcgggtaacatggaagtccagtgatgaaagtgtggtaactgtagacgaaaagggtaaagtaaccgccgttggaaatggaacagctacaatcacagtcacatccgtaagcggaaattataccgcaacggtagccgtaaccgtaaagattcctgtagaaattgagaagatctcgattgaagcagagaaggaaacactgacgaagattggtgaatccacagaactgaaagttaagatcgaacctgagaacgcagacgctcagaagctgatctggaagtctgacaatgaaatggttgctgctgtagatgagaatggtaaagtaacagcaatcggaaatggaatggcaataatcacagtaactacagagtatggaaaaaacacagcttcaataataatcacagtgaagatccttgataagcctgtaattaacaaaacaaaagggttcggacgcttaaaagtccgttctgtaaaccagacgaaaacttccataaccttagaatggagtaaacttgatggtgtggacggatatttggtatatggaaaccgctgcaatacaagtacaaagacatacaaatacaaaaagcttgccactattacaaacggacgtacatggacacataaaaacctgaagaaaggcactttctataaatatatcgtaaaagcatataagatagtagatggcaaaaaggtagtgacagatacatctgcctccatacatgtaatcacacagggcagcaaatacggaattgcaagatctgtttccgtaactaagatcggaaacaaaaagaatgtttcaaaaataaccctgaaaaaaggaaaaacagcacagatcacagtaaaagaaataaaaaaggacaaaaagatcagacaccacagaaatctctgctatgaaagcagcaatacagcagtagccactgttaccccggaggggcttatccaggcagttggtaaaggaacctgtacgatatgggtatatgcacaaaatggtgtatatgcggcactgacggttactgtgaaatgataaaacatgatatcatctgaatatatataaactacggccaccagctaatccagtgaccataagcaacggggcagcacacatttcagcaagagttggatcgaagcgttttgttttttatattcaagtactgacgaaaaaaagccataagtgactccaacagctatcatttgttctgattctgttttctacaaaagaaataaaaaatattaagatattagaaaatcataggtatataatctttaacaccaaaaaccggattgagtttattctgctcaatccggttttgccctattccctttctctttttaaagtttaactttttcagatgaagaaaaaaagggctgccatatacagaacgctatggaaatgttgttatactatgatgcattacaaagctttttcagctttaatatatcctgattagtgctataatattctaaaatgttaatagacatacattttttatttccaaaatgttgatttctatacattttttatttccaaaatgttgatgctcgaactataatagttactgtagatatttttatattatttgttgataggaggattttataagtaactgaatacattgactaacaggattaaatgtgtttaaatatactcaaaggagtaaaaggttatgaacacatcaaatatcacaaattataagccaaaagattttgcggaactgttaggcgtatccgttaagacattacaacgctgggacagagaagggattctaaaggcagaccgaaccccaactgatagacgttattacacttacgaccaatatcttcaattcaaaggcataaataccgaaaatgatatgcgacaagtggttatttatacaagagtgtctacaagaaatcaaaaagatgatttacaaaatcaagtcgcgtttttacgacagttttgtaatgctaaaggaattattgttgatcaatgtattgaagattatggaagtggtcttaattataaccgtaaagaatggaataaactgttagatgcagtaatggagggaaaaatcaaaaccataataatcacccataaagatagatttatcagatttggttatgattggtttgaaaaattctgtatgaagttcaatacgaccatagtggcagtcaataatgaagaactatcaccacaagaagaacttgtacaggatattgtttcgatccttcatgttttctcttgcaggctgtatggacttcgtaagtataaaaaacaaatagagagggatgaggaaattgcgaaagagcttcaagacggaaataaacccgtcagaggaacagaagatcaagatccgtaagacaataggaacttgcaggtttatctacaacttctatcttgctcataataaagaactttataataatggcgaaaaatttatgagcagcaataagttcagagtctggcttaataatgaatatcttccacaacatccggagtattcatggatcaaggaagcttattcaaaagcagtaacgcaggcagtgaacaacggacagaccgcatttacaagatttttcaatcatgaaagtgcctttcctaatttcaaaaagaaaggcagatctgatgtgaagatgtattttgtaaagaataatccaaaagattgtcgatgcgaaagacataggatcaacatcccgtcacttggctgggttcgtatcaaagaaaaaggatatatcccaaccacaaaagatggatatgttattaaaagcggttccgtttcaataaaagctgacagattttatgtttccgttcttgtagagatccctgataacaaaataactgatgatcctaatgagggaataggcattgatcttggattaaaggaattcgccattgtttctaatggtaaaacttataagaacattaacagatcagcaagacttaaaaagcttgaaaaacaacttattcggaaacagagaagtctctcgcgaaaatatgaaaatttaaagaaaggagagtccactcaaagagcaaatttacaaaaacaaaagcgcaaggtacagaaacttcatcataagatagataatatccgcactgattacattaacaaaacaatcgctgagatagtaaaaaccaaaccatcttatataacgattgaagacttaaatgtaaaaggcatgatgaaaaacagacatctttcaaaagcagttgcatcacagaagttttatgaatttagaacaaaacttcaagccaaatgcagggaaaaaggaattgaacttcgagtagtagatagatggtatccatcgtctaaaacctgtcactgttgcggtgctgtcaagaaagatttaaaactttcagataggatctttaaatgcagttgtggttatgtcgaagatagggatttcaatgctgctttaaatctgagagatgtcacgacttacgaaattgcataacgaaacgcaaacgtgagtatgtaccgaaggctatttcgggaatttacgactatggagtgtacaagaacctgtgagtagatatgatctcgttcaatccaaagcatacacgatgaagtagtaagtagaactcgtgagagtctacattatctcgatgtgcgtatatttgcacacgctttgagtggcaggaaatgccttatgataagaaaacaactcttaatcggaatactggcagctatgactgtcgcgctgccagctgtcggcatatatgccggttccgcagaagccagtgaaatccaaagcagcaatgaagacacggtgtccggtaataaaggagccagtatcgacaaagccgtgacattacagaattccgtaaaaatgacagaccaaatctctgcggcagtcaatggagaaaatattatgttcagtcccacaagccttaattttgcgctgggcatgatcgcagaaggtgcagaaggagagacaaaagaagttctatgtaattacctgggaaccgatgattttgcatcttatgcaaaggaatatctgaacaagattaaagaatataatactgaagatgagagttacggatataagtcaaaattaaagattgcagatgcagtctgggtggataataatctgacattacaggaagaatttaaaaattcagtaacgaacggttttggggcggaagtggaaaatgtagatttttccgctgcagagaaaacatgcggtatcattaattcctggtgtgacaaaaatacggaagggctgatcccgaaaatcataaccccggatctgatcaatgatactaccggactgtgcttaactaattcactatattttgagtccggatggagtggagaaccctggaatgtttctgatacagaagagaagtttggaaacaatgaaaagacaaaatacatgacctgtgccggagacaggtattatgaaaatgataaggcaacagcatttgacagagagtatgcaaacggactgagttttgtcggaatcctgcctgtcgatgaaggcgattttacacttgaggatctggatattggtggactcctgaaatctcagccagagtatgacgaagtacaatgtaagatgccaaaacttgattttgagactaccgccatcctaaatgacatactctcaagcctggggcttgataatatattttccagcaacgctgatttctccggtattgcagacaaaaatgtaaatgtagatacgatactgcagaaaacaaaactggaactggatgaaaacggcacgaaagcagcagcggtgacagcagttatcatggaatgtatgtcagctgtagaggagaaagaaccagttatcaaaaatgtggaactcactcgtccttttgccttcctgatctatgacaggagcaataacgaaatactgtttatgggaaaagtaatgaccgtttcctgatgaaaaggggatgccatgcgtggcatccctcttcatgaattatttttttctgttctcaaaataaacaaaacggtcaattgcatccagaatatctttaaaagtatcccttggagcctcctctatataggatttgaggatttcagtttcgtttttacggaatcttccgtaaaagatatcatataaattatgtccgcggagacagatacggatttcttccatatgttctctgatatctgtagtatttttgagagcatggccgatcatttctgtgagatgctgaccgctttttaatttgtatagatattcattccactttttcaacaggatttcgtagaaatcatcctcactttttatcactccgattttttccattatcttcggatccaggaaataattctcaaaggaataatacttcaggatcagaacattttctcgagtcacacgcggtagtctgtccatatcctcacggttacgagcctcataatacctgcacagggaagaagccagttcttctgcatctttaccatccccatcccggatcatcaggaaattatcacgcagatatgtctaatattgtggttttatcacaataacaaatatgatgtgaatcatgaagtacacggtattcccttggtgtacatccataacactccataaaatatttggaaaaataactcaggtgattaaatccacacagcatggcaatttccgtaatacttttccgggtggtacacagaagctgacagctgattttcaacctgtatgcattcagaaagtcaaccggtgactgttgcatataatgcttaaaaatctggcagcacttactaggaaacgacttctgaggaatccggcataagctctgttctgattaaatccaaaaagctcacctcgtgtacgatttttataaaaatcaaagactattctgatagatttccatatatgagaatactataattatagcatctgcaaaagtaaaaaatcaatcggaaacaatgtagtgattggcgcaggaagtgtggtatccaaagatatccctgataatatgatcgcagctgccctggaaagtaaactgatcgtgactacgctgaaataaattataaagggatggtgaaggaggatgtttagtaacatatagtcaacatgatagaataaatgtttatactctatcttgcatcttctatttattcatgttaaaatcttaagatgtcaaaaatacaatatatatgagataaaaaacagcagtgagctgttatgaagataggagataacaattaaatggcaatgagtccgatgatgcaggaatactgcaagacaaaggaacaatataaagactgcattttattctaccgtctgggagatttttatgaaatgttttttgatgatgcattacttgtcaccagggaactggagattacccttacaggaaaagactgcggattagaggagagggcacccatgtgtggtgtcccttatcatgctgcggagacttatatcaatcgtctgatcgagagaggacataaggtagcaatctgtgagcaggtagaggatcctaaaaaagccaaaggactggtaaagcgtgaggttgtaaggatcgtaaccccaggaaccacactggatgctgctgctcttgatgagacaaagaataattacctgatgtctattgtgtctatggaagaacatttcggatgcgctattgcagacattacaacaggtgactgtttccttacagaggtggacaaacctcagaaacttcttgatgagatcaataaatttgttcctgcagagattatctgtaatgattctttttatatgtctaatatagatacagatgacttgcagaaccgtcttgggatctgtgttttttcattggattcctggtatttcgatgacgagttgtgccgccgcacactaaaagatcattttcatgtaggttctctggagggattgggcgttggtgattatgactgcgggatcattgctgcaggagctcttttcttatatctaaaagaaacccagaagacagccttgtcccatatgacaactatccgtccctatgcagcagagaaatatatgcttatcgacagttccagccgcagaaatctggaacttgtggaaaccctgagagagaaacagaaaagaggttctcttctctgggtactggataagacaaaaacagcaatgggagccagaactctccgcagttatgtggaacagccactgatcgacagagatgagattgaacaacgtctggaagcactggaagagttaaataaaaacggaatgctccgggatgagatcagggaatatctgggacctgtttatgacctggaacgactgatcagccgtatcagttataaatctgcgaatccaagagatctgatcgcatttgcttcttcgctggaaatgcttccttatataaaacaggttttaaaagaatttaaaacacctctgcttcagaaaatctatgaggatatggattcgctggaggatgtgacagatctgatcaaacgtgccatcgtggaagatccgcctcttgcacagaaggatggaggcattattaaagagggctataatgaagatgtagataaattccgccgttccaggacagatggtaagaaatggctttcagaactggaggccaaagagcgggagcgtacaggcatcaaaacaatgaagatcaaatataatcgcgtatttggttattcactggagatcaccaatacttttaaagatctggtgccggataattatatccgtaaacagacgcttaccaatgcagagcgatacattacccaggagttaaaagaactggaagacctgatccttggggcagaggataagctgtatgctctggaatatgaactgttctgtgatgtgagagatgcagtcgggaaagaagttatgcggatccagaagactgccaaggcagtggctgcactggatgtgtttgcttctcttgcactggttgcggaaagaaatcattttgtacgtccgaagacaaatacaacaggtgtgatagatattaaaaacggccgtcatcctgttgtggaacagatgatagagaacgatatgtttattgcgaatgatacatatctggataaccataagaaaagggtatccattatcacaggtccgaacatggcaggtaagtctacctacatgagacagactgccctgatcgtactgatggcacagatcggaagctttgtccctgctgaaaaagcaaacattggaattgttgacaggattttcacccgtgtgggtgcctctgatgatctggcaagtggtcagagtacctttatggtagagatgacagaggttgccaatattttgaggaatgcaactgcaagaagccttctgattcttgacgagatcggacgtggcaccagtacatttgacggtcttgccattgcctgggctgtgatcgagcatatcagcaatacaaagctttgtggtgcaaagacattatttgccacccattatcatgagcttactgaactggagggtaaaattccgggagttaataactactgtattgctgtcaaggaaaaaggggacgatattgtatttctgcgtaagatcgttcagggcggcgcagacaaaagttatggtatccaggttgccaagcttgccggtgttccggattctgtgatccagagagcaaaggaactggtggaggaactaagtgatgcggatattacggcagcagtaaaagacctgacatctgcgaaaaagaaaaagcctgtatacgatcagatggatatggcacagatgtctctgttcgatacagttaaggataacgatatcattgatgagataaaaggtcttgatatggggaatatgactcctatcgaggcaatgaatacactttataacctgcagaacaagattaagaacagatggtgataaaagttgagaaaaattgcagtattagaccagcagaccatagataagatcgctgccggtgaggtagtggaacgtccgtcctccattgtgaaggagcttgtggaaaatgcaattgatgcaggagcaactgctgtaacagtggagatcacagacggcggcaaaaagatgatacgtatcacagataatggcgggggtatggaaagagatcaggtacccctggcatttttgcgtcatgccaccagtaagattgagaaggttgaggatctggaacacattgcgtctcttggatttcgcggtgaggctttgtccagtattgctgctgttgcacaggtggaactgatcacaaaaaccccatctgcattaagcggcgtccgttatgtgatcaacggtggtgtacaggagtctttagaggatatgggagcaccggaaggaactactttcctggtgagaaatcttttttacaatacacctgctagaagcaagttcctgaaatcagatactacggagggaaattatgtcagcactttgatggagcagctggcattgtcccatcctgagatttcttttaaatatatccagaataaacaggtgaagcttcatacttccggaaattacaatgtgaaagatgtgatttataatatatatggaagagatatcaccaaagcacttcttgaggtatcctacgagaatgatttcatgaagattgagggttttgtgggaaaaccggagatttccagaggtaaccgtacctttgagaattattatattaacggacgttttgtaaagaaccggatcattgcaaaggggatagaggatgcctataagggttttctcatgcagcataagtttccctttgtttctcttcatattcagatggagggaaatgatctggatgtaaatgtgcatccaagcaagatggaggtgcggtttgcaagaggaacagaagtttatgatgcagtttacgagacagtccacaaggctcttaccacaagagaaatgatccagacagtgccttttggaaaagaagaaccgattaaaaagcagcagcctgtggtaaaaccgggggatgtaccggagccatttgaaaccagacgtcgggctgaaattccggagtatcgtccacagactgtaaatacagcttccagggtttctgagcataccgcactaccacgaggaactgttacaatggcagaacaggcagtgcgtgaacagcagatctatcagactagggatcctcttaccaaggcagaggaacagctttttgagggaacactaagcgataaaaagaatgaagaacaaccggtattttcagagacaaagcaggaaattgcagaacagaaaactgcagaatatctgaagactgctgtggattcagaaggaaacagaaaacagatagaacaaaacaaaaatgtaatatcagaagaaatcagaccacagcagctggaattatttgaggagaaacttcttgctcctgaatcccgaagccgtcatcagctgatcggacagatttttgatacttactggcttgttcagtttgaggataaattttttattatcgaccagcatgcggcacatgaaaaggtttattatgagcgtttcgtaaaaaggtttcgtgagcagacagtagaatcccagtatctcagtccgccgctgatcgtatccctgaatcttcaggaagaagctcttcttaaggctaaccgtaaatatttcgaggattttggatttgagattgaaccatttggcggtaaggaatactgtatcaatgcagtcccggccaatctgtacggtcttacggaggaagaactttttctggaaatgcttgacaatcttgcttctgagaaggataaggatccccttggaatctttgcttccagactggccaccatggcatgtaaggctgcggtaaagggaaatcatcagatgtccgaccgggaggcaaatgcattgatcgatgaactgctcacactggagaatccctatcactgtcctcatggaagaccgacgattatttccatgactaaaacagaactggaaaagaagtttaaacgtattgtatagtttatatataaggagctattatgaaaaagccactgatcgttcttacaggaccgacggcagcaggaaaaacccatctatccattgctcttgcgaaagcagtaaacggagagatcatttctgctgattccatgcaggtctacaaatatatggatattggatcagctaagatccggccggaggagatgcagggagtaaagcattatctggtagatgaactgctgcctcaggaagaatttcatatcgtgaaattccagcagatggcaaaagctgccatggaagaaatttatgccaaggggaaaattcctgttctggtaggaggaaccggattttatatacaggctattacaaaggatattgattttactcaggcagagcaggaagacggataccgtcaggagctggaacagcttgctgcagaaaagggaaatgaatatctgcatcagatgcttttggatgttgatcctgtcagtgccggggaaatccacgccaataatgtaaaacgtgtgatcagggcactggagttttatcatcagaaccagtcgccgatctccgcacataatcaggagcagaaggaacacgaaaccccttataatctggcatattttgtgctgaatgtaccaagggaacttctttataaacggattgatgaccgtattgatgagatgttaaaagagggactccttgaggaagtgcagaagttaaaagatatgggataccacagggggatggtttccatgcagggacttggatataaagaaatccttgcatatctggatggcgagtatccgttagaggaagcggtcaggatcctgaaaagagataccagacattttgcaaaacgccagctgacctggttccgcagggagaaggataccacctggatgaataaggatgaatttgactataatgaagacagaatccttgatgaaatgctgaaggtatgcaggaacagaggaattttataaccgaatttttcttaaaaatcactgatacagaataagtgaaattcagagataaaataaagataataatgcaaacagaaatgaggacgaaacaaattatgaaagaaatgtatgcacagcttgggatttcttcagaggtttatgactttggtcataagattgaggaatctttaaaagaaagatttgaaaaatttgataaaacggcagaatataaccagatgaaggtgcttcttgccatgcagaaaaataaagtaagcgcagaatgcttcggaagttcttccggttatggatatgacgatattggcagggaaacacttgaaaaggtttatgcagatactttccatacggaagcctgtctggtacgcccgcagatcacatgcggaactcacgcgctggccattgccttattcggtaatctccgtccgggtgatgaacttctggcacctgccggaaagccttacgatactctggaagaggtaatcggcatccgcccgtcaaaaggttctctcgcagaatatggagtaagttaccgtcaggtggaactgttagaagacggaacctttgattatgacagcatccgtaaagcaatcaatgaaaaaacacgtcttgtggagatccagcgttccaaaggataccagacacgtccgtctttctctgtaaagcagattggagaactgatctcttttgtaaagagtattaaaccggatgtgatctgtatggtggataactgctacggtgagtttgtagataccattgagccaagtgatgtgggagctgatatgatcgttggttctctgatcaaaaatccgggcggcggacttgcgcctatcggcggttatattgcaggtactaaggagtgcgtggagaatgcttcttacagaatgacctgtcccggacttggcagtgaggtaggcgcaactctgggagtcaaccgttctttcttccagggatttttccttgcaccaatggttaccaagggtgcgttaaagggagctgtgtttgcggcaaatatttatgagaaacttggattcccggtaatcccggattccacagagccacgtcaggacatcattcaggcggtaagtcttggcacaccggaaggtctgatcgcattctgtaagggtattcaggcagcagcaccggttgacagttatgtagatccggagccatgggatatgcccggatatgacagtcaggttatcatggcagcaggtgcttttgtacagggctcttccatcgagctttctgcagatggtccgatgaagcctccatatgcagtgtattttcagggaggacttacctgggaacatgcaaaactgggtgttctgatgtccctgcagaaaatggttgataaaggacttgtaactttatgaaaaaaagacaggtagtgatcacaggagcaggagcctgtggactgatggcagcgatcatggcggcccgaaacggggcagcagtcactgttctggaacagaacgagaaacccggaaagaaaatctgtgctacaggaaacggcagatgtaatttttccaatcttgcaagaccggatgatgcatacagaggcgaacatccggaatttgtcgaagatgcactcagagagttttctgtcgagaataccattgagtttttcaaagagataggaatctatcctttaaacaggaacggctatctttatccgagaagcaatcaggcgcagagtgttgtagatgtactgtgtatggaggctgccagtctgggtgtgaaaataaagacaaacgaacaggttacagaaataaaaaccgggacaaatggaaagaatttccaaatcctgacaaaaggatggcactatgatgcagatgcactgatacttgccaatggatcccaggcatcttctgtttcaggttcagacggcagcggatatgtgctggcagagagctttcatcaccgcattgtcccggtttatccggcacttactgccctgaaatgtaagggctcttcttttaaggcatgggctggtgtgcgtacagaaggagaaatttccctttttacagatgggaaattctgtaaatctgaacgtggcgagctgcagcttacagaatacggaatttccggaatccctgtgtttcagctcagcacttatgcagtacgtgcagtcagagaaggacataaagcagagcttcacattaatttcatgccggagctgtcagaggaaggattaaagaaactcctgtatgcacgaaagaaggcatgtccctataaaaaagaaaaagaactcctggtgggacttttcccggaaaagcttatcaaaatccttatatcacaaaaacaactggtttctgccataagggaatttcctcttgaagtgcaggatggcatgtcattttcacaggcacaggtctgctccgggggagtagatacctcacaggtaaattctcaaaccatggagtcaaagctctgtaggggtctgtattttgcaggggagcttctggatattgacggtacatgcggcggatataatctgcaatgggcatggagcagcggcgcagtggccggcaaaaatgcagcaaaggaggagaaaaattgattcgaatttcacagctgaaacttccaatcacacatacaaaggcacagctcgaaaaaaagattgcaaaaacattaaaaaatcccggaaacagttttacttacgagataaaaaagcaatctctggactgcagacacaaaaatgacaaaatctttgtatatactgtagatgtaacgatcagagatgaacagaaactcgccaaaaaagttaacaataacaacattatgttaacaaaagagaaaccatatgaatttccctctccgggtgagacacctcttttacattctcccgttattgtgggaagtggtcctgcaggacttttctgcggatggtatcttgcgaaggccggatattgtccaataatacttgaacgcggagaagaggctgagaaacgtcagaaaacagtagagaatttctggaaaaatggtgttcttgaccctgagtccaatgtacagttcggagagggcggcgccggcaccttttccgacggaaagctgaacacgctggtaaaagatccttacggacgtaatcatgaggtactgaagcgtttcgtagctgccggcgcaccggaagaaattatttatcagcagaagccacatctgggaacggatgtgctggttggtattgttgaaaaaatgcgtcatgaaatcgaagaaatgggaggaaaattctgcttccgttccaaggtgacagatctgatttttgagaacaatacattaaaagaaattgagatcaacaatgataagagaatccctgcacaggtctgtgtactggcaccaggacacagtgcaagagatacttttgaaatgttacagaaacgtggtgtttatatggagccaaagtcatttgcagtggggttgcgtattgaacatcctcaggaaatgatcaatatggatctttatggagagcctgagaatgaattacttggtgcagccagctataaagtaacccataagtgtgcaaatggcagaggtgtttattctttttgtatgtgtccgggcggatatgttgtaaatgcatcctctgaacccggccgtctcgcagtgaacggaatgagctatcaggcacgtgattccagaaatgcaaacagtgccatgatcgtcacagtcacaccagaagatttcccggataaaggagttcttggcggcgtagaatttcagcgtagtctggagaaaaaagcatgggagctcggagaaggaaaaattcctgttcagctgtttggtgatttttgcaaaaatcaggcaagtgaagcattaggagaggttactccctgtatgaagggagaatatatactgacaaatgtacgctctgttctgccaaaagcagtaggcgattctattgaagaaggtgtcagagccttcggaaaacgaatttccggatttgacagagaggatgcactgctcagtggcattgaaagccgtacttcttctcctgtaagaatcgtacgtaatcaggagctcacagcaaatatggcaggaatttatccatgtggcgaaggtgccggttacgcaggcggaatcacaagtgctgccatggatggaatcaaggttgctgagactgtatgccggaaatatgcggctataaaaaataattgatctcttaagcgggatattaccggtaaacataaagttcacataaaaatcagagaggagagtgtacatctctcctcttttatgctagaatataatttgcaatttgcccagaggctttagagagcacaggcagacttatgaataatgcaaataatattatgaagcagcttcccagggaacagcggccgtatgagaaatgctttatgcagggtgagggttcattaaatgacactgaactgctggcagtaatcctgcgcagcggcacttcaggaaagaattcactggcacttgcacaggagatcctgaaatttatggagtcgtcctcctatcccggccttatggggcttatgcatgtatctgtacaggatcttatgaagattcatggaatcggacaggtaaaagcagtacagttaaaatgcattggagaactttccaaaagaattgccaaggctgctgccagaccgcagatagttatgaacaatccctcctccatagcagcttattatatggaagaactccgccatgaagagcaggaactggtgatctgtatgatgtcagatgtgaaaggacattttctgggagataagatactgacccggggaactgcaaccggttcgctggtaacaccaagggaaatcttcatggaagccctgcgccgccatgcagtcagtctgatattgatacacaatcatccaagtggtgatcctacaccaagtccggatgacttacagatcacagccaggatttatcaggcgggggaactgctgggaatacatctgctggatcatattgtgatcggggatcagagatactgcagcttcagagaagaaggattatggaatacatgtacagaataaggcaacaacaaaggggcagaatatgctatttgagaaaacatatggaatagatttgggaagcagttccgtaaaagtctattcttttttcagaaacaaaacttatatcgagaaaaatatgatcgcgtccaagggacacacgatcattgcaatgggaaatgaagcatacgatatgtttgagaaatcccccacagatattacggttacttcgccaatgacatttggcatgatcgctaatctggaacttcaggagattgttctttacagtatgatccgaaagatcgatcatatcctgggatttggcgcaacaatgtattttactgttcctctggatatgactgcggttgagaaacgggcatattttcatgtggcgaatggtcactggttaaagaaaaatcgcgtatttatggtagaggcacccattgcagatgccattgccatgggtgtcaatctggaagatccggaaggaaatatgatcgtaaatatcggtgcacagagtacagaagtatcgatcatcaccggaggaaagatcattatcagcaggaaaataccgctgggaggcagacagatgaatgaatctgtctgcagtgaaatacgtaaaagatataatctgcagattggcacaaggactgccaagaggcttaagatggtcatgggacgcctcagtgatccgaaaaaggaagtacgtaaggttgtaggaattgactgtatttccggactgccaagagaagaaatcatttcttcttatgtggtaaatgacggtatcatgaactgtctgaatgagattgcggcagagatgaaaacatttctggagcgaattcctccccagatttcctaccatattgcgaaacaggggatttacataaccggaggcagtaccagacttccttatattgataaataccttgccagttatacaggattcacctttaatctgtcagatttttatgaaacctcggcagttacaggtctggagaaaataatcagaaataaagaactgcgtgaatgggcagtaccggttacgcagagaaaactataatttttaggggtgcatcaatgaaaaacctgaaaaagaaagtacattttaggattaaattaaaaagtaaacatcttctggtcattatgtcgattttctgcgtcagctgtattgctgccactttttcatccggcgtaaccactgcaccgctgcaggatgccgccgggatactgatcgttccatttgaaaacagcatcaatcggatcagttcagttctgaaaggaatgcaggaccgtatgcgtgataaagaagaaatcctcagtgagaacgaaaatttaaaggcacagatagacagtctcacagaacagaacaataaactgatccaggatcagacagaatatgtaagattacagcagatgtataatcttgaccagcagtataccgaatatccaaagattgctgcagaaatcatatccaaagatccgggcaactggtatgatacctttatgatcaaccggggatctgcagacggcattcgtgtggataataatgtacttgcagataaaggtctggtcgggatcgtgacagaggtcggaactcactgggcgactgtacgttccattatcgatgacagcagcaatgtcagtgccatgactgtcagcacacaggataactgtgtggtggaaggagatctggaactcatcgatgagggtaaattaagcttcagccagttgtatgaccagaataataaagtaacagtgggggaacgcatcgttacctccaatatcagtgagaaatatgtagagggactgtttatcggatacgtcagtgaggtggaacaaaacagcaacaatctgaccaaaacaggtaccattgtcacacctgtagatttccagcatctgaaaaatgtacttgtcattacagtaaataaacaggattctgttaatgacaatgctcaggcagctcaggaggcgactgcaaatgaagagtaagatagcgttattttttatgatcctgatcagttttcttcttcagtgtactcttcttcatgtgatatccatcggttctatcacgccgaatctgatcctgatcctgtgtatatccatggggctgatgcgcggaagaaaaagtggactgtggacaggatttttctgtggatttctggtagacatgttctatggctctgtgtttggtttctacgctctgatctatatgtatattggctttttaagcggatatgcccacaggatctgctatgatgatgacataaaggttccggttatgcttgcaggtatcggggatttactgtacggactttctgtctatgcattgcagtttctgctcaggggacgtctggggctcggaacctatttataccggattattttaccggagattttttatacagtgatccttacactgattgtttaccgggtatttcattatattaattatcatttcatgaagaatccatcaatgaaggaaagtgagtctatttgggtactaaaataaaaagattttttaaaaagatacgaataaaacgtaccacagtactggtactggtttttgtatttatgtcagccactctggtccgtcagctttttgaactgcagatcatccagggagaggcttatatcagcaaatttgaatcaagaacaacaaaaaaacgtgtgatcaaaagtacgcgtggcaatatctatgacagaaatggtgaggagctggcaacaaatgtgctggcttattctgttacctttgaggataatggaacttatgattctaccagagaaaagaatcttacactgaacgggattgcctataaagtcctgaaaatccttgagtccaacggggattccatcagtaccggcttccatattgttttggatgagagcgggaattatacttttgatgttgatgagggatttactctgaatcgttttcgtgcggatatttacggagaaccgttgattgataacctgacaaaaaaacagaaaaatgccactgcagatcagatgatcgagtttatgagcggaaaagagggattttccattgttctttacggcgataatgcttataccaaagaagaactgacatcccatggacttccggagaacctgtcaaagcaggatgtacttgagctttccaaaatccgctatgcactgagcactaacagtttcaagaagtacatggccgttacgatcgcttcaaatataagcgaaaaatctgtagctgcaatcagagaaaatcagccggagcttcagggaattgacattgtagaggattctgtccgcaaatacattgatgatgcaagcatgggaccaattcttggttatacgggacaggcttcttcagaagagcttgaagaactgagacagaagaatcctgattattcaaatgatgcgatcatcggtaaatcgggaattgagaaatatatggaaacttctcttcagggaacagacggtgaagaaactgtcactgtcgataaccttggtaaagtacttaagattgacgacagcacgagagtagaacctgtcgcaggtaacgatacctatcttaccatagacagcagctggcagtccgccatctaccagatactgaaacagagagttgccggaatccttttatccaagatcgaagcatccaaaacctatgatttcagtgtaaatgatgctgcacagatcaagataccgatctatgatgtatataatgccctgattgccaacagtgtcattgatatcagtaaattcagtgatgccaacgcctccgatacagaaaaaaatttatatgccaaatttcaacagaaacagcaacaggtttttgatacaataactaacaggctgacagctgagaatccaccgaccgtaaaagatgaagatgatcagatccaggaatatcttacttatatctgtgatgatcttctcagagatacgctggggattatctcaaagaatgccattgatacctctgacagtacttatcagaaatggacaaccgataaagatatcagtctgaaagattatctgacatatgcggcaagtcagaactggatcgatatttccaaattttctacagaaggagattatctggattccgatgaagtatatcaggctcttacagattatctgatcgattatcttaaaaaagacaccaatttctcaaaacttctatataagtatatgcttcaggaggacaccatttccggaagcgagatctgtctggtgctgtatgaacagggagttttatcaaaagatgatggcagttacgaggcactggcctccggctccatgacagcttatgactttatgatcaataaaatttatactctcgaaatagaacctgcacagcttgcgctggagccatgttctgcttctgcagtaatcacagatgtcaaaacaggggatgttcttgcatgcgtatcctacccgggatatgacaataaccgtctggtaaataacatggatacggattattatgcgaaattatctacagataaatccagtccgtttttcaataaagcaacccagcagacagcagcaccgggttctacatttaagattctgtctacaattgccggaatgtctgaaggagtgatcgatgacggaacatacattaactgtaccggctcctttgatcttgtaacacctccgatcaactgctggaacaaacagggacatggagagatcgagatcagggaggcgattgagcagtcctgtaactattatttcaacatggttggttttaaacttggtctggatgcagacggaaacttttcagaaaaccgaagcctgagtgtactgcaaaaatatgcttcagagattggtctggataagaaaacaggtatcgagatcacagaatccgcacctcatgtgtcagattcctacgcagtcccgtcttatatcggacagggtaccaatgcttataccaccagtcagctggcacgttatgcaacagcgatcgctaccagtggaaatgtttatgatctgactttacttgacagacagacagattccaagggtaatactttaaaaaaatatgagccggatatcattaatacagttgatgtatcacagaatgtgtgggatgatattcacgacggaatgtaccgggtagtacagattcacagacagtttgacggacttggcgtggatgtggcaggtaaaaccggtacagccgagctaaatgtttatcatccaaaccatggtatgtttatgggatatgccccggcttcagatcctgaatatgcgattgcagtgcgtattgagaatggatatacttccggtaatgcgtgtcttgcagctgatgatatttttaaatatatctttgaattaactgatgaaaagtctattcttaccggtgttgcggcaagtgataccagtgacacttcgaatgactgaaactaccatacaggagaataccagaagaatggaaattttttcagggaggaaattgtaactatgagtgaagtcattgtgattacttccggcaaaggcggagtaggaaaaaccacaactgtcgccaatatcggaacaggtctggctatgctgggcaaaaaagttgttgtggttgatacagatatcggtctgcggaatctggatgttgttctgggcctggagaacaggattgtctataatctggtggatgtcattaacggaagctgccgtctgcgacaggctctgatcaaggataaaagacatccggaattatgtcttctgccatctgcgcagacaaaagacaaatccgctgtgtctccggaacagatgataaaactgaccgacgatctgagagaacagtttgattatattcttctggactgtccggcaggaattgaacagggatttaaaaatgcgatcgcaggtgctgataaagccctggtagttaccacgccggaggtttctgcgatacgtgatgcagatcggatcatcggactcctggaagccaacgagatcagagatatcagcctgatcatcaatcgcctgcggccggatatgattgcaagaggtgatatgatgtccgtagatgatgtaacggatatccttgctgttgatctgatcggaacaattctggatgatgaacagattgtgattgccacaaatcagggggagcctctttccgggaaatcttctcaggcagaagaagaatacatgaatatctgtaaacgcctcttaggtgaagagattccgtttgcagacattaacaggaagcaggggttattaagaaaaataggtagttttttcaaaaagtagcctgtatttataagggggaatctgtgtgaaagctttttttaaagaaaagaagcgttcagccggatatgcaagagaccgcatgaagcttctgctgatctcggaacgtatcgactgctctccacagatgatgaaaatgttgcggaatgatatgatacataccgtaaaaaaataccttactattgatgaagaacaggtaaaaatccagattacgcaggaacctgcagtactccatgcgtatattcctgttttaaacaaaaaggataaccgtttggtatcttcacagttactaaaaaggacagataaattatgttaaagcaatataaattaagattttacaatttcagactgatcattttcctgctggcgatcagcctgataggagttacactggtaggcacagcagcatcggacctgcgatcaaagcagtttgccggagtaatacttggacttattgtcatgctgatcctttctttgctggattactcatggatcatgaactttcagtggatcatgtatggatttaatattatcatgctgatcgttgtgcgtattgcgggtgacagtgctaacggtgccgccagatggatcggtatcggatctttccgatttcagccgacagaattatcaaaaattatcctgatcgtattctttgcaaaattttttatggatcatgaggaaacactgaatacacttaaaacgctggcattatccggcgtgttactggcagtacctctgttcctgatcctggaacagccggacctgaaaaatacaattactgttgtagtaattttctgtattatgatctatattgcaggtttaagctataagatcatcggaggagcactgcttattgctgttccattgaccattatttttttatcaattgttgtccagccggatcagaaactgctcaaggattaccagagaagtcgtatcatgtcttttttgtatccggaaaacgaagaatactcggatgatattgaacagcagaataactctaaaactgcaattgcttcaggggaactggttggtaagaaattaagcggtgataacagtacaacttctgtaaatcagggaaacttcgtggcagagaatcagacagactttatttttgctgttgcaggtgaagagtacggatttattggatgcgtgataattgtattgctacttttggcaattgcctttgaatgtatccggatgagtcttcgggcaaaagatttgtcaggaaaggttctttgctgtggaatcggcggcctgattgcactacaaagcttcattaatatctgtgttgcaacaggtcttgcgcctaatacgggaactccccttccttttgtaagctatggactgacttcgctggtaagtctgtatattggtatggggcttgtactcaatgtaggacttcagagcagcacatacaataaagaaattattcaaaaagaaattgacagaagagaggattacttatgagaacaaaaaagaaatcttccggtaaaataccggaaaagaaatctgctgttccatacaaatctgcagctccgcacagacacaaaccttccagaccgcttcagacagtcaaactgccgaaatcgcagatgccatccagacaaacagaggagcatcaggctctgctgcgtacaaaatatcataaaaagcgtcagagattaaaacatatattcaggattctggttggtgtatttgtgattcttgcagctgccggcggtgttttttacggatggaatatattaagcggaaattattttggtactcctgaacaggcttttgattcttctgaagttttcacaaatgcccttgcagctaaggaaaatatgagaacagaatcttttgcccagaaattatgtgtttcctcccaaggaaatgttgattgtattaagaatgcccagctggaagaaggacagaaagggctgctgttcagtctgagcaatcataaagtactgtatgcaaacggcatttatgataaggtgtatcctgcaagtattaccaagatcatgacagcaatgcttgcattacaaagtggaaaactgaatgacactgtcacgatcactcaggataatgttacactggaggatggatcacaggtctgcggatttgtggccggcgatcaggttacccttgatcagcttctccactgtctgcttgtatattccggcaatgatgcagcttctgccattgcggaatatgttggaggcaatacagagaacttcgtacagatgatgaatgattatgccgcaaagcttggatgtacaggaacacatttttccaatccacatggactgcaggatgaaaatcactatacaacaccatatgatatttatctgatgctgaatgaagcattcacctaccctgaatttacagaaattacagagttgccgtcttatacagtaacctatacaggctcagacggaactgaaaaaagcaccacgcttaccgcaacagaccattatcttaccggagaggcaacagccccaaaagatgttacaattctcggtggtaaaaccggaacaacagaagtagccggcaattgtcttgcaatccttacacagaatgcatacggaaaaacttttgtttcaattgtaatgggagctgctacgaaagaacttctgtatcaggagatgaattcactgcttcagaatatcaacagttagtcaacataaaacggatacagttatcattaattgtatccgttttatgttatagaaaattctccgcaatgtttttataacacctataacataataaagtcttccgacaggggtcgtacaagaccatccactttgctgttacaagaattccggttacataaaagaacgaggtgaaagatcatgaataacaattgtattacaacatacacaggcaaacatatagatccattacatccggatccggatatgatctgtatcgaagatattgcacatgccttatctttaatctgccgcggaaacggacaggtaaaaacttttttttcagtaggtcagcattgcatcaactgtgccagagaagcccttgcgcgaggatattccaggcgtgtggcatttgcctgccttctgcacgatgccagcgaatgttatttatctgatgtgccaagaccattcaagaaaaccctctcaggatataaagagcaggagaaaaatctgctggatctgatctatcagaaatatcttgggagcccattaaacgcaaaagaagaacaattattaaaagaaatcgatgatgatatgctctggtttgaccttacacacctgctaaatgaaccccaggaaagggaagcaccggagattcatattacaatagattatacggtacgggctttcgaggaaacagaaaaggaatacctggaattgtatagcttttttaccaattgaaaaaaataaatttccgcgaagaagaacttttgcaggtatccaatgattttctttcaggatgaactgatgcaaaattgggaacttgcaaaagatatgaagctattaaatagaattaatccgcttatctaaaggggggaaatcatatgaatgaatattttcactgatccgtttactgtatataagttagaatccattaataatctgattgcttgaataatgtgatcacaatttaatatgagtagcataaacgctctcgggagttaatcctgggggctttgttgcgctaaaaagtttttaattttttggtgatttgtgaactgaatgatcttcatattgtttgataagactctcaaaatcttctatgatagaaatatctcatagtgataaatatctccaaaaatccagtaaaaacatataatttttatattttcgttactgtgaacggagtgaacagtaacactgacctccggctttttgtaaattgttaaaagaattatattgttatatgatttcgtaagtgatatacttaaacataagtaaaaccgtgtgaaattacagtttgcttttcgcacggtttcttttatacatagcagttagttaaaactaacaacagaacgatgtgaaagtacttttgactatacagaggaatacataatgctaatgaatgtttttgaaggtatactgattccatttgttggaacaacgctaggtgcagcatgcgtgttttttatgagaaaaatacttagaaagttactacaacgtgcacttgcagggtttgcagcaggtataatggttgctgcttcaatctggagtcttctgattccggcaattaaacaatctgagaatatgggaactttatcgtttgttccggcagttgttgggttctggattggtatattgtttttactcgcacttgatcatttgattccacatcttcatgttggaagtgatcaggcagagggaccgaaaagcaaacttggccgtactacgatgatggtgttgacagttacattacataatatccctgaaggtatggcagttggtgttatgtatgcaggatttcttgctgaaaatgcacagattacagcaacaagtgcacttgctttatcacttggaattgctatccagaatttcccgtaaggagcgattatatccatgccgcttagggcagagggtgaaagtaagagaaaggcatttctgggaggtgtactttcaggagtcgttgaaccggttggagcagtaatgacgattcttgtcgcacagctggtaatcccgacattaccatatttactcagctttgcagcaggagctatgttatatgtcgtggttgaagaactaattccggaaatgtctcagggacagcactcgaatattggtacgcttttctttgcggttggatttagtttgatgatgattctggatgtggcactggggtaagaggagaggaatgattcttatgagaatattgatttatggtgctggtgtgattggatccttgtatgcggctttatttgcagaagccggttatgatacaaatatttatgccagaggtaaaagacttgaggctttaagaaataatggattgcaatataagaaaaatcaggaagtaataaaggcagagattaggattcttggagaactaccaaacgatgatatttatgattttgtcttgcttactgtccgggaaaaccagctgtgtgaagcactaactgaattgaaaaataataaaagtaatacgattgttacaatgataaattcactggacagttacaataaatgggaagacattgtcggaaaaggaagaatattaccggcttttccaggagcaggcggaagtataaatgatgatggtatccttgatgcagcacttactccaaggttgattcagccgacaacatttgcagaaatatcaggaaataaatccgaaagaactaagcagttttcagagatattgaggcatgctcatataccataccagaaagtaacggatatgcatctatggcagctttgtcatcttgctatggtggtaccaattgcggatgcgtattatgaatcagacaatccggagaaagtagaaaaagaatggaaaatcatgaggaaaacagcagaaaggctgaaaagaaattttatttttttgcgaaaacaaaatggtaaactgtcaccatggaaaatgaatatttttcgctttttacccttgccatttttagcgattatgctggtagttacatttggaagcagttttggagataaatttatgtatcaacatgctatgaaggcaccagatgaaatgagggaattgcataagcagttttatgcttatataaaaaaaatgaagaaatgcggatgcaaggcgaaaaaggtacagtgattggagaaaaagcatgaaaaatgaagaatataaaaaattgtcaattaaagaatttacaaaagcagcaggaagatatgaaagtagccatgctggtatttacgaaatgtgcaagaaagattatccggatattctggaagaattagagaaggagtcatttagagatttattagatgcaggctacggacctgctccgatgatttctttattagcagaaaaatatccagaccgacattatacaggactggatctgactcctgccataattgaacaggcaaaaaagaaaaatattccaaatgcaacatttgttgtaggagactgtgagaactttccttctgaaaaggattcatttgatgcaattatttgttctatgagcttccatcattatccggatccacaggcattttttgacagtgtgaaaagatgtcttcgtccaaatggaagattgatactgagagatgtgaccagtgacaataaagtattggtatggctaatgaatatattggaaatgccgttggcaaatatatgcggacatggagatgtccaggtgccaacaagagatgtggtcataaaatgttgcaaaaaagcaggattaaaagtagaaaaatttgaaattcgtaaaggtatgcgaatgcattgtgttgtgagaaaacctatgggaaaggcgataggaaatgaaagataagtatcttagggaaacacgaatggttgatttttctaatccggcaattcaaaaacttattcaaaatatgaaatggaaggaaatgggtgaatttgaaaggattaaggcaatctacaactatgtaagagatgatgttttatttggatataatattgatgacggaatttcagcttcaaaagtacttgcagatggttatggacaatgtaatacaaaaggaactttatttatggcacttttacgtgcctgcaatattccatgcagagtacatggttttacgattgataaaagattgcagaaaggggctatgacagggtttgtttaccgtaatgctccaaaaagtattttccatagctgggtagaaattaatttcgaaaatcagtggtacgaactggaagctttcattttggataaaacctacataaagaagttacaggaacaaaattcggaatgtacaggtgcattttgcggttatggagtagcagtcaaggatttcagaaatctcattattgagtttgataggaacaatacttatattcagagcgagggaatcaatcaggattttggtgtttatgattgtccagatgaactgttgaaggaacatcatcaagaaatttcagcctttaaagcatttgcttatagacatattggaagacacctcatgaatcgtaatgtcaggaagattagagaacgatagttttaagcttttagaattaaaattaaatttggagggtaatatggcagacaaaatacaaaatgcttatgaaacatcaaaaaatatatatgacgatgttcttacgcaaagaaatattttcagcaaactgtatattaagttattttggagtggcactgatgataatgatatagcgcgaaaagttttatcatatgttcctgatgacttttcaggaaatcttcttgatgttccggttggaattgctgtatttacggaaaacaaatggagttctctgaaaaatacacatattacttgtattgattacagcatggatatgcttgaacaagccagaaaaagacttggtagtcatgcacatatcaaatgtattcagggtgatgtgggaaatctgcaaatggagaatgaatctgttgataccgttgtcagtatgaatggttttcatgcatttcttgataagcaaaaagcatttcatgaaatatggcgtattttgaaaccaggcggcgatttcattgcctgtttttatatcaggggaaattcgaaacggacagattggctggtaaaaaatattcttgcaaagaaagggtggttttctccaccatttcagacggagaaagagctgagagatatccttcaaaaactatataaagaaacggatatccatgttgacggttctatggtatatttccgttgtgtgaagtaatgcaatgatgctggatttataataaagtttcagataataagtctggaactttattttttgtccaaatggattgccaaggtccattcgggtatggataaagcttaattctcatggtaagatataaaaagttagaaatgactaacgaagaaaatatagctatatgaagggaatgagaagaaatttgaatgtgaatgaaattgcaagccttggaagtaatgtgaaacctgtgattcagaatgagaattgttcgattcttatactgaatgatgcgacaggagaaggagtgatgacgatttaccgagtactgcccggagtgatgatttgtttttcagacatgcatatggaacagtgtgtatctgaatttgaattgaagaatgacagaaaaatattctgtattgaccattgccgggagggaagaattgagatggaggtaaagccaggcgtgttcagcattatgcaggaaaatgaacttcgtctggataacagagagaatcataaagggacaacttattatccgctgaagcattatcacggagtcagtattttcatggaagttgtggaagttcagaaggtacttgatgaattgtatcatggattttccgtttccattgagaaacttcgaagccggtattgtgccgaagagaaaccttatgtaattcgtggagataaggagcttgggtcaattctttcaggattttaccagaaaaacatggcacatccggaacttgcaaaagcaaaagaatattatcagataaaagtcgtggaattgttgttgtacttaaacacgatgaccgtagaagacaggaaagaagtcagaccatattattacaaaactcagatggaaaaaatcaaagggattcatgcgcagatcacagggaatcctcagacacggtttaccatcgaagaactttcctctatgtatgagattccactgacaactatgaaaaaatgtttcaaagatgtttatggagattctatttattcttatcagaagaggtaccgcatgaatctggctgcaaatatgctgttacaggataaagagaaagaagtacaggagatcgccgcaagtgtaggatatgaaaatccgggaaaattttcatctgcatttcgaagtgtgatggggctgtctccggcagagtaccgattcaaaaaggaaacatatgatggaaaataaaaaagtatcagaaaaaaaggacagctggctgaaagtgttgctgagctataccgaaggaagcgggcaaaggcttggaatatctgttattttatctgttatcagtattattagtggacttatgccatattattgcatttaccgtggaatcgatttgtatataagaaatctgaatcaagctcctatgcaggaaattttaagatggtgtctgtatgccttactcttttacactataaaaatcgtaagcttttccgcatccacatggatatcacatatagcagcctatcacatattggagggtttaaggctccgcctgacagaccggtttctgaaagcaccattaggagatgtggaagggcacagtattggtgaaatcaagagcattatggtagaaaaaatcgaaaatatggaaccccccattgctcatatgattccggaaggaagcggacatctcctgcttccggtaatcagctttatcgctttgcttacgctggactggagaattgcactggcttcccttgtaaccgttccattgtctttggtatttatgacacttaccatgattatcagcggaaaaagtttcactcagtacgacgaatccaatgcacatatgaacagtactattgtggaatacatagagggcatagaggttattaaggcatttggcagggcaggaacctcttatgagaaatatgcaaaagcaattctggattataagaaattcgttgtgaaatggctgtcttccacctggatcaccatgaaaatgacattcgccctgtttccatcgacactgcttggaactttgcctgtgggactgtatctgacgatgcatggtcagttgatcatatcacagcttgtgctggcagtcatgctgtccatgtccatggtgacatcttttgcaaaaatagaggtattctctgaaaatcttcgtgaaatgcaatataacatcgaaagcatacaggattttcttacgatgaaagaattgccggagccttctgtatatgcaaatatcaacagctatgatgtgaaactggaaaatgtgcatttctcttataccggtgaggaaaaggacgaggtgctgcatggaattgacctgacgatgccggcaggaagttttagtgcattggtcggaccgagcgggggaggtaaatctacagtagcaaggttgatttcaagattctgggatgtgacatccggcgacattaccataggcggtgtaaatattagggaaatgccattgtcacagctttcagaaatgatcagttttgtgacacaggataatttcctgttccggtgttctatcatggaaaatatacgtctcggcaatccggctgcatcggatgaagaggtacgggaagcagcaagaaaggcatgctgccaggagtttatagagaagctgccgcagggctatgataccccggctagggaggcaggaaaacgcctgtccggtggagaaaagcagagaattgctattgccagaatggtattaaaaaatgcaccgatcgtcatccttgacgaagcgactgcatttacggatccggaaaatgaaaacaagattcagaagagtattgaagaactgacaaaaggcaagacattgctgatcattgcacacagactttccacaatcacagatgcagacaaaatcgttgttttgaaaaatggctgtatagaaggggcgggaacccaggaagagctgcttcagaattgtcagctttatcagcgaatgtggcaggctcatgtgggagcaagacactgggcagtgggaagtcagaaagaaggtgaagactcatgtttggcactgtaaaaagaatcattgactggtgtggaagctttaaaaagaatctgtatattggttttattttttcctttttttcaggctggtttgcggcaatgcctgtcgtatgggctgcatatatgatcgggaagcttgtagaatgcgaaggacagggaaaagctgtctcaacggtttggattgggaaaagtatcgtgattctgctgttcttcatttttctgcgctttctgtttgattatctgagagcaagatttcaggagtcgatcagttatgaattgattgccagagacagacttgcagtaggagatgcactgaaacgtgtatctttaggatatttccagaatatgaatacaggtacgattcttaattccatcacgacaggccttcatacactggaaggaatgggaatccgtatgattgataactttgtaggaggttatctgaattttatctgcatccttttgtggctcacctgtgtgaactggagagtggggctgattgcagtgacgggtgctgctgtttctctgatatttctgcttatcatttcaaagtacagtacaagaaatgcaccaatccttgctgcggcaaacagagatctgaccggagcaatcctggaatatgccagaggactttctgtagtgaaatcctttggaaaagcaggagcttctatggagtcaatgaaaaaagcatgcagggacagccgtgacattaatctgaaaatagaatggggatatattccttataatgcactgcatctgctggcgttaaaaacagcaagtgtgtgtatcgtaattgctacgttttatctgggattttccggacagttggattttacttatatgatgtttgtgattctgctgtcatttcatgtgtttggttctttggagccgattacagactgtgctcatgtactggctgtcattgatgacgccctggagcatttggatgaattgacaaaagagtccttcattgatgcagatggacagcagatagagattgcacactatgatatcgaatttcagaatgtagatttttcttacggggaagggaaggagagaagacaggtgctccataatgtgaatctgaaaattccggagtattcagttacagcaatcgtgggtccttccggaagcggaaaatctacgatctgcaatctgattgcccggttttatgatgcagacagtggaagtgttcgtgtgggaggacatgatgtgaaagaatttacttgtgacagtctgttatccaacatttccatggtatttcagaatgtatatttgtttcatgatacagtgaggaataatatttgctttggaaaaccggatgcaacagaagcagaaatggtagaagcggcaaagaaagcatgctgccatgattttattatggcattaccggaaggctacgatactgtcatcggtgaagggggtgggagcctgtccggtggagaaaaacagcgcatttccatcgcaagagcgattctaaaagatgcaccgattattatacttgacgaagcgacagccagtgtagatccggaaaatgaacatttgatccaggcagctatatcggaacttacaaaaggaaaaaccatagtaacaatcgcacacagactggcgacaattgagcaggcagatcagattctggtggtggatgatgggcagattattcagaggggaacccacaaagagcttgtggctgttcctggaaaatataaggattttgtagatatcagaattcagtcggaaggctggaaaatcggctaaggaggaacgaaagacatggaagaatcaagaaaattatcaggaaaggatcttattacaataggaatcttctctgcaatttattttatgctcaatctagcagctatgtttactggatttgtgccagtgttgtggctgctgttaccgggcgtgacaggaattgtgaccggaatcccattcctgcttatgacagctaaagtgagaaaaccaggggcagtatttattatgggaacaattactgcattgctttatttcgtgactggtcagtttacagtattgttactgattacatttgctattgcatgtatattgtcggaactgtacaggtctgtgacaaagtatgataacagttttacacatatgatgatatcgtttgtgtttttctgttatggaatgcttggctctccactggcaatatgggtgtataaagacagttttttggcgcagattcagcaaaatggaatgtctgcagaatatgtccggtctttatcgggattgatttctacgccaatgctgattatactttgtatctctccagtcataggaggcgtgattggagcgttgattgctaaaggtttattccgtaaacattttaagaaagcagggattgtctgatgaataagataacagtcatcaatcatcttgatccaagagctgggctgtggctgcttttaatggcaaatattggtatgttctgtcagaaaacttctgagcaggggagtatgctttcaggcatatttctccaacttattctggtgcatggactatataaggcggcaggtaaaggtatcgttttacttgtttctttccaccttttactaatgtatgtatttccgcagtgccccgcatggatgaatatggtgtttccagttttagttaattattcattgcgtatgctgccgtgtgttttggcaggtttgttgctgcttcgaacatcgtccatacagaaaatgatcgctgccatgtatacactgcatctaccacaaggatttatcatagcaatgtctacgacacttcgatattttccagctttgaaagaggagttcgtacatataaatgctgctatgaaacttcagaatatctcatgggcatcccgcttggagtgtacggtagttccattgatcgtgtctgcagtcaatacatcggatgaaatagcagcggcggcagtggcaagaggaatcgagaatccaggaaaaaagactagtgaaataacacttcacatgggaatttcagactggttgataatgattttggtaacatttggaatacttatagtggtgattgcgggataaagaaaatgataaagtttgaaaatgtaaatgtaacaatgcaaggaaaaagaattctgtcagatataaatctggagatacaggatggggagttcgtattgatatgcggggaaagtggatgtggaaaaaccacaatgacaaaactgattaatggattgattccgcattttgtaagggatgtcagcgtagatggaacgattacggtttgcgggaaaaatgttgcagagatgcctatgtatgagattgcagagcttgtagggtctgtttttcagaatccaagaactcagtttttttatacgaattctaatgctgagatggcatttggcctggaaaacagaggcgtggaaccggaatatatacgaaaaagaattaagaatacaataaatgaattagatatagagaagctggaagaccgggatgtattttccatgtcaggtggtgagaaacagcttcttgcgtttgcatcagtatatgctatgaatccgcagatttatgtgctggatgagccgtcagcgaatttggatatagcagcgatggaaaagctgagtgaaagaatgaaggtaattaaggagaagggacatactgtagttgtggcagagcatcgtctggcatggatccagaaattcgcagacagaattatttatatgaaagaaggacgtatagaacaagaatttacatcagatgagtttaaggctttgtctgatctgaaacgaaaacaaatggggctcagaagtatcgttcctgaacagatacagatcccggagattataggaaactcagaagacgcagtacttcagatttgtaacctttcatgtaagagaaagaaacagatgatttttcagaatattagtttatctgcaagagcgggagacatcatcggtatcacagggaaaaacggtgccggaaaatctactttttgcaattgcttgtgcggtctgcttaagcccaaaggcggcgagattctgtatcaagggaaaaagctgtcggaaaaggcccggaccaaactgttcgggatggtcatgcaggaagtcaatcatcagttgttttcagatagtgtgaaaaatgaatgtctgcttgcaaatgaagaagcctctgaacaagaaatcagggaattacttgaaaaatttgacttggaagagtatgcagaatatcatccgatgatattatctggtggacagagacagaggcttgctatttgccaggcagttatgggtgaaaaaagctgcttattttcgatgaacctaccagtgggttggattttaggcatatgtgtcaggtggaaaaattgatgaaacaattgtcagaagaaaaatatattattatagttgtaacacatgactatgagtttttgaatcgagcttgtaagaggtatattagaataaatagttaacttttaggaaaggaaaacggattaaaggaagaaattatccattcatgaacggcttgagattaataagaggattattcaagaaaagcagggaaaagataagccggagagaggggctgatcggggtgtaagataggtaaaagttaagactggaagtcactggtgtaggtggcttctggtcttttttcgcaaccacagttagactgtccccatttggcggtctggatttttttgactgttgcgagaacatcgtcagaatttgtcggcggtcaggttgtatcatgtgcggctccctccttgtaagccgccgtgagtgccagcgtcagcgcgtcatcccttttgagggtaatcgagtaggaggaatttctcttaaatgagaaattccgacctctcacaccaccgtacgtacggttccgtatacggcggttcaatcaacttaacaagtaacacacttttcggtgtagtaatctaacattgagattagatgtagtggcagagtttcggaaagatggaaaactggttcctatattctttacctgggaagatggaagaaaatataacatcgacagaattttgaaaatcgagcgatgtgctagcagaaaggcaggcggtgtaggaatgatgtacacctgtatgatacaggggcaggaaagccatttgttttatgaagtggataaatggtttatggagagaaaataatacaggatgatacagaatcgtaaagaaaaggttcaacgttagccttataatagtgtcataaaaggaggaatcacaatgaatgatttagtagaacagatacttgaactaattaaaggcaagaaaacagctattgatatgcaggcgattatgttccagtcaagaagtacgacttataggaaattaaaagatgaaggaacttcaataagtgaaattaaaaatttgtatcaagattgtggagctttttcagtaatcagaaaaaaagatgatatgtctaggagagcatttaaagaagaattatcaaaatttttgctgtgtgatccggatgatgtatggaaaagatttaattaacgctaccatatgggtgttattgagtacaaaaaggaaataaaaaagaaaaatcaattaacggacttagagtttgatttactaaagagacaaatattattcataataagaagagagccacatacgctaaaacaattatgtgagatcacaaatagatcaagaagctatgttttagctgcactgaaagacctggatcaggttcttggaggatatggaggtggacttggaaaagggtattttatagtgagttcggagaaagaaagattattacatgcttcatggtgtgcaaattggaaaaaatcaatgcagtattgttagaaaattaatgattattaacctgcagggatagtcactttccctttatattcctgcaggttttacataagaagatggattccggtcagcaaaggcaactcccacaatgccttttggatatccgcttctgcaaattgtagtaagtaattgcttcccatcaaaatcatggggaaagcgaactggtctgaaagaccgccagttagtgtgatgatgataaggagattttgaaactgatgacagacagagattatgcaattaaatcaatgaaagagattaccttccagatggcaagccatgcgcaggattatctggaagtaacgatggagagacattatacagatatcaaagaactgatgacaagctatcaaaaattgattttggaaaatcagattgtgttagaagaactggatatggagtgccaggagaaaatcaatgaagatatggcatatgcgttgagttatctgagcatttataacaatcagctgaatgtgccaaagatgcatcgggaaatgaataagctgatgatcatttatggcttgtcagatatgatctatcgtggaatgacactggttaagttctatgcaccgaatggtgtgatgctcagcgaaatccttcattcctgtttttgcagtcattataataagacagatgtggaagtacaacaggagttaggaataggcaggacttctttttataagacttctttttataaaatgaagaagcagacacttgggtatttaggattttatttttatgagatcgtggtaccgcaggcaaaggataaaagatttaaaccgtcactgggcgttgaggaagagtaggtgagtaatatgagatacgaagattcgatgaaaggtgtagctgatcagataatcaaagaacagcagcgagtcagtaaaattaaaaacaatccagaagagttccattggcatgacgaatatgcaacgttgaatttctttcggtttatctgcaaaaatatcggtaacttgagaaatggagaaattgaaaaaatggtcacacgtttaaagaacatagatcaaaaagcagtggaaaaccatgtgaatggtgctgtttgggcatttgattatgataagatgttctgtgtattgatggaaaatgaaatttgccgaaaggtgtgtgaaaagaataaatataacagttggatgaatctgattggacagtattgtgtttcaaggacttaaagacgaaaaaagttgttggagagaaataatttccagcaactctgtctttaatgaatagagttcatttttttattcaactattcccatgatatatacaatatgtaaatttgcaattcaaatatcagtttatgctaagtacaataataataattactattattgataagagaataattatcatgtataatacagatatacaagaaacaaagtgttagaaaaattgctaggaacttggtaacaaaaataaatcgacattgaaaagggaaaatgactatgataaaatatgaatgtgaaccatgtggatatatttatgatccggcagtaggagatccagacgctggtatcgatccagaaactgcatttgaggatattccagatgactggacatgcccaatctgcggattaggaaaagatgttttcgttcctgtagaagactaagcagaaaatgcaggtacaaaactgccagacattaaaagatcctaagagaacatataaaagaaatggaggtcaaattatgacttacgatttaaacattacctttgatgacaatttagtaacaggaaatgaaacaattgatacccagcataaagaattgatcgaccgtatccagaactttgtaactgcctgtcaaaatggcgacagcaaagtaaaagcaatcaaaatgctggattatctggatgaatatactgactttcattttaaagaagaggaaaagcttcaggaaaaatccggttatccagagcgtgaaaaacattatgaaaaacatgaagagtttagaaagacaattcaggaactgtatgaataccttcaggagtatgaaggaccgacagatcggttcagtgaacttgtacagaaaaatgtaatcgactggctgtttggacacattaaaacatatgaccgctctgtggcaaaatttatctttatgaaacaaaatccagaccgatgctaaaataaaccagggaacgagttcattcagaatgtagacaacgtgatgaagtaaactaggggctgtcacaatgcagcccctttcctgttatagcgatattctaggtaatatattgcgctggcatgacatattattttactactactatatgggaagagcaagtagctcttctttttttgtcctttttatccaattttaagttgtaaagtctcttttcatgccaacagaaatatgctaaattgattttatagaacaagatataattccacttatatatcggaggaaaatgaatgagagagaaaactatatatgagaagattgcagaaaagtataacacaacaccagaagaagtacgcagagaaatgcagatagccatagatgcaggatttgataatcctgacccggctgtgcaggaagaatggaagaaaatgacacttaaaggagacaggcccacaccggaagaagtaatcaattacgcagtaaaaaaattaaaaggaaattaaaaatatgaagaaaaagataattgcagtaatttcaggaacagcaatcttgataattgctgcaggaagtatttatgggaaatttgaatccagtcataaagaaggcgaaccagatgtagttggaactttttctgtaaatcgggatgaaaatataaccgtggtcgcaaatagggaagatattgaggatagagaagcgtttgcaagaaaacttttgcagatgtacaaggatgattcttttcattcgacaaaattctccacagacagaggatatgcgacgagcattgatatgcacatctatttatggaaagaggatattgaagacggggaatcggtaatgacagccgaatatagacctgtagaatacggaaaggactatgatattgtcaataatcctgataaatttcaactatatatagatggaaaagagattaaatagtaatctcctgaaagcaagctttttgtcaattatttcaaagaaaaattaaaggataacaatacatagttttgacaatgatattttgaaaaattttataggaatgctctattatcaaattgacataggaatatggtagcgtataattagaattgaatacactgaaaaaatggaggaattacatgaaagcacataaatattggtcagtaggagcattgatcacaatgattggaactttttatacaggatataaagggttaaaagcagcacacaaatactttgcatttggctctctgatatgcatgattatggcagtctattctggtcataaaatgatttcgggtaataaaagaacaagaaaacaggtgaaaaatacaaaagcggaggaatagtaaatgttagagttaggaataaaagcaccggattttgaattgccggatcagaacggagaagtgcataaattaagcgattatgcaggaaaaaagtgatcttatatttttatccaaaggataatacgccaggatgtacgaagcaggcatgtggcttttctgagcgttatccacagtttactgagaagggagctgttattctcggagtaagcaaggactctgtagcgtctcacaagagatttgaagaaaaatacggactggcatttacgctattagcagatccggagcgtaaagttattgaagcatatgatgtctggaaagaaaagaaaaattatggcaaagtctctatgggagtagtaagaaccacatatcttattgatgaacaggggattattataaaggcaaatgataaagtcaaggctgcagatgatcctgaaaatatgctcaaggaattagattaatgaagataatattatcccctgctaaaaagatgattacagatactgacagcatagcgccggatggattgcctgaatttattgaaaagacgacagagatacaaagttggttgaaaagtaagtcaaaagaagaactgaagactatttggaaatgtaatgacaaaattacagaacagaacttcaatagattggaaaacatggatctttatcatttacttaccccagctgtcttatcatatgaaggaattgcttttcaatatatggctccatctgtgtttgaggacagtcagttcgagtatgtacaaaatcatttgagaataatatctgcattttatggtgtgttaaaaccaagggatggtgtgacgccttatcgtttggaaatgcaggcgaaggttggaataggagaaacaaaaaatctgtatgagtactggggagatttattataccgctcagtgattgataacagcaggattataatcaatctggcatcgaaagaatactctaagtgcatagaaaaatatctgacacgacaggatagatacattacgattacattttgtgagttatcaggagataaactggtgacaaaaggtacatatgctaagatggcccgtggtgaaatggttaggttcatggctgaaaacagaattgaaaatcctgaggatattaagaaatttgatagactaggctattcattccgctctgatttatcatcagatgcagaatatgtttttgaacggaaaacagagataacatcttgttaaaaagatacttgttatgggtatttttttaataaagtaattcgatttttcttaaaaaatcattaccataacgattatgatattatatttaaaggtatttgtccaaaatatagagaaagtaaatgaatagcatagttattgaaatgaatattatttaaggttagagataaattatgaaatgaagacaaacaagaaaagtaaaaatttaataggtattatacagagtttccttatattgatattggtagttcttattatttttatgatgattcagattagtaggctgcagggaacagcacgcgtaataaattatgccggtctggtacgtggagctacgcagcgcgaaataaaattagaaattacaggaaaccaaaatgacgaattaattaaatatttggatgatattcttcttggattgagatatcaggatggacattatgacctggtaaaactcaatgacgaagagtatcaggaaaaattgcaaatccagagtgattactgggataaattgaaaacagaaattgaagcagtaagaaacaagggatacgaaaatacagacattgttaatatgagtgaaatatattttacgatggcagatgaaactgtctctgccgcagaaagttattcagaaaaaatcgctgtaaagattcgtaccatagagcttttgtcggcacttgatatgttgagtctggtgatattggttattatgcagactctaaaggcaatgcagatggcaatgcaaaacagactgctggaacaaaaagcattcgtagatgcccatactggactgccaaataaaaatgcctgtaatgagctacttaataaaaaagatataattacagattctacagcatgcataatgtttgatttaaataatctaaaaactgtaaatgatacaatgggacattccgcaggagatcagttgatattgaatttcgcaaagcttttgtgcagtgtcattccagaaaaggattttgttggaagatatggcggagatgagtttatagcagttatttatcatacgagcgaggcggaaattaaggagatattaaaatcattgtcaagagaaaaagagagattaaatagttgtgaaaatcaattaccaatcgactatgcatgcggatgggcattatcctccgatgatatagcgtgtacaatgcagatgttattggatgatgcagatgcttatatgtataagaataaacagttatgtaagaaatataattagcgctcagctcagagtagatgaatcttcttaaatataatcgatgtatgtgacgtttgcggatgggaatatgatgaagaggaaggttatcctgaaggtggtattgcaccaggaacaaagtgggaggacgttccagaagattttgaatgcccattatgtaatgttggaaaagatcagttttcagaagttgaataaaattctgattatttaaatacggatagataaacaaaaaccctggtgcgtgtgagcaacagggttttttattgcgatagtttgtgatgatatcacagaaaatgatttaccttttgcttataatgtaactacaaacaaagtaaggaggtagtctaaatgagattaaaagataaagttgcaatcattacgggtggaagccgtggtataggatttgctacagctgataaattcttgaaggaaggtgcttcagttgtgttggcagcaagttcacaggaatcggcagatattgctgtagataaattaaaagaaaaatatcccaatgcaatagttgctggaattagtccaaatctggcaagcatggagtctgtcagaaaggcttttaaagaggcaactgaaaaatatggatgtgtcgacatactggtaaataatgcagggatttcagaaaacacctcttttatggattatacagaggagacttttgataaagtcatggatctaaatgtaaaaggagtatttaatactactcgtgtagctgcagaatgtatggtggcaagaggcaagggggtcattctctcaacttcttccatggtgagtatttctggacagccaagtgggtttgcttatcctgcgtccaagtttgcagtaaacggattgactgtatcattagcaagagaactaggacctaaaggtattcgtgttaatgcagttgcacctgggattacagaaactgatatgatgaaggccgtgccaaaggaagttatcgaacctatgattgaaagaattccattgcgtcgtcttggacagccagaagatattgccaatgcgtttgtgtttcttgcttcagatgaggcgagttacattacaggtgttatattaagtgtagatggtatggcaagaagttaagttaatgaggtatgctgatgtaatcacggaaaataaatgaaattaagactataataaatctacaaaaagaaaaagatgaggaggactgtaaaatgtctgctattaatatcaataaaaataattttcagaacgaagtactgaattccgataaacccgttcttttagatttttgggcatcttggtgtgcaccttgccgcatggtagtacctattgtagaggagattgcaagtgagcgtagagatattaaagttggaaagattaatgtagatgaagagcctgaactggcaaataagttcagtattatgagcattccgactttagtggttatgaagaatgggaagattgtacagcaggtttcaggggcgagacctaagaatgcgattttagaaatgctttagggaggtgtgctaatgggattttttgatctctttaaacagtcgaatattaatcaaggcatagaagaatataaaaggactgatgatgcagttctgctggatgtacgtacaccgcaggaatatcaggaaggacatataccagaaagtaaaaatgtgccgttgcagcaacttgacaatattgcttctgtagcaaagaataaggatatcccactgtttgtatactgttattccggttcacgaagccgccaggcaactgggatactgcaacgaatgggatattctaaagtaaataatatcggtggcattgcagcttactcaggaaaggtggaaaaataagatgaaggtaataattgtaggaggtgtagccggaggagctacagccgcagcaagaatacgcagactgaatgaacatgctgaaattactgtgtttgaaagatccggatacatatcctatgcaaattgtggacttccatattatattggagacgtgatcacagacccggaagaacttacactacagacaccagagagtttttttaaacgcttccgtattaacatgaaaattcatcatgaagttatctccatacatccggaacgtaaaacggtttcagtgaaaaatttggagaatggtgagatatttgaagaaaactatgataagctgatcctttctccaggtgcaaagccaacacagccgagacttcccggagtaggtattgataaactttttacacttcgtactgtagaagacacttttcggataaaggaatatataaataagaatcatccaaaatcggctgtattggcaggtggcggttttattggtctggaactggcagaaaatttgagggagcttggcatggatgttacgattgtccagcggcctaagcagctgatgaacccttttgacccggatatggcatccatgatccataatgaaatgagaaagcatgggataaaactggtactgggctatacagtagaaggatttaaagaaaaagacaacggagtggaggtcctgttgaaagataatccatctcttcaggctgatatggtggtgctggcaatcggagtcacaccagacacagtattagcaaaagaagccggtctggaacttggcatcaaggaaagtattgtagtgaatgacagaatggaaacctctgtaccggatatttatgctgcaggtgatgcagttcaggtaaaacattatgttacgggtaatgatgcgctgatttctttggcaggaccagccaataaacagggcaggatcatcgctgataatatttgtggcggtgatagtcgttacctgggcagtcagggaagctccgttataaaagtgtttgatatgacagcaaccactacaggtatcaatgaaaccaatgccaaaaagtcaggattagaggtagatacagtaattctttctcctatgagtcatgccggttactatcctggtggaaaagtgatgaccatgaaggtggtttttgaaaaagagacctatcgtttgcttggtgctcagattattggatatgaaggagttgataaacgtattgatgtgctggcaacagcaatccatgcagggctgaaggcaacccagctgaaggatttggatctcgcatatgcaccgccttattcctctgccaaggatcctgtaaatatggcaggattcatgatagacaatatagcaaaaggtaccttaaaacaatggcatctggaagatatggataagatttctagagataaaagtgttgtgttgctggatgtgagaactgtaggtgaatttaacagggggcatatggatggattcaaaaacattcctgtagatgaactaagggaacgtatcaatgaaattgagaagggaaagcctgtttacctgatatgccagagtgggctgcgaagttatattgccagtcgtattctggaaggaaatggatatgaaacatacaacttctccggcggattccgcttctatgatgcagttgtcaatgaccgtgcgctgattgaaaaggcatatgcatgtggtatggattattaaaaataatcataatatttttataattttctcgtaatataaaaagatcccccatttattagaatgactttcataattctgataaatggaggattcttctttatatgttacagaaaaacaattttatgacctttggagtgtttccagtctttttggatcaaggattgtgattttgccgcgggagagtttgacgagaccctcgccttgaaagtatcgaagcattcgagtgataacttccctgtgggaaccaagatgattagcaatcgtctcatgagtgattttcagctcgtttgttccttcgatagaggtctcttctaaaagaaatgaagcaacacgcttatccaaactcttccacatgatttgttcaatcagccacatgacatcagaaaaacgggtggccattaactcattagtatagtttgcgacgggagcagattccttcataatgcccttatagatttcagcagggatgatccaaagatcagtatctttttctgcttcaatggttacttcaaattgaatggagcgtatgatacatgaggcggataaaagacacatatccatatcgaacagacggtaaagtgtaatctctcgtccttcatctgaaagtatgtaagttcgaagctgcccggatttaaccagtaataatccagtacaatccaggtttccattgtgaatgattgtccctttttttacatactgtgtgattaaattgtctgaaattatttttttctgtgctgtatttaagtcattccatagtggaaaacaattttcgaagttcataaccgttatctcctttacgaacatagtatacttgctttttttagatgcgtcaattatataactggcatatgccataaatagaaataaaaagaagtgtaataaagtaaattatcttttctgtgatatcatcacggaagcaagcacttatttggggtatattaagttcaaataggagaaggagttgaaaaatatgacatctataaatataaataaagaaaagtttggacaattaattcataaggaaaaaccggttttggttgatttctgggcaccttggtgtggttattgccgtagaattggagcggcttatgaaaaaataagtgaagaatacagcgatattcttattgctggaaaagtaaatattgatgaagaaccacagattgcagaagctgaaaagattgagataattcctacgctggttttatatcgaaatggaaaggcaatagattctattgttgcacctgaatcaaaaataatgatagagaattttattaatgaagcattggaaaaataaaaggaggactgctgtatgaatgaaaatcatgtttacgatatgattatcgtggggggaggacctggagggtatacttcagcattatacgcagccagagcaggatttgatacaattgttttagaaaaattatctgcaggtggtcagatgtcattgacctggcagattgataactatcctggttttgaaaatggaattgacggattttcattggcagagaaaatgcaaaaacaggcggaaaaatttggcgctaaaagtgaatatgctgaagtttttaatatggatttaacaggaaagcttaagagagtagaaactagttcgggaatttatattgggaaaacagtagtgattgctactggagcaaatccaagagaacttggtctcgctaaagaaaaagaattgataggtcatggggttgcttattgtgcctcctgtgatggcatgttttataaagataagatcgtggtggtggttggtggtggaaattctgctgtatcagatgctgctcttttaagtcgaattgctaagaaagtcatcattgttcatcgtagagatacattacgtgcaacgaaaatctaccatgaccagctgatgaaaactgaaaatatagagtttcgatggaacaatacagtaaatgaactgatttatggagaacgattgactggtgtgcggttgaaagatacagttacaggagaagaaaacattatagaatgtgacggcctgtttgtgagtataggaagaaaaccgacaacagattttttagataatcagatagaactggataataaaggatatattgtggcaggtgaaaacactgaaacgagtattccgggtgtttatgctgtaggagatgtcagaacaaagttacttcgtcagatagtaacagcagtggcagatggtgctatggcagtacatatggcagaagagtatatggagaaataataatcagaatttgaatagtgaactttttatactgaaatatgtacgatttcaataatgacatgaacttatgggaacgtattgcggatactttgtgaactttatcctgatacaatgattatgctgatgaaagaaggcatagataactgaatacaagaaagagacgaaagcctcagtagttaagaaaaaaactactggggctttttttcgtgcctgaatttctcggccaataactgcggggatgtcccggcaggataaaggtggagcaggcatgatcctaaacagaggtccgccttctgaatttgaaacgagcaacaagatttcaaattcaggaggaacggatatgtatattcaacacccatatttttatgaaggaaagtactacgcaaatattgatggagaaatgatcgagattacaaaattgattctgaaacggtcaaaaagggctttactacaccaattttacaccaaacacataccaagatgtaagaagatataagaaaatacatagagttatgaaatagaatagaaatatctcatagtgataaatatctccaaaaatccagtaaaaacatataatttttataatttcaacaaaatttcacaaaaaaatgtaaataccacttgtgtttttgaataatatgcactataatatcacatttacgattttatcccgtaaaatcaagggaaaacgggtgttaaacaggtgtaactacaccaaatttacaccacagaatatagcattacatctataacaataacagaacatttaaacatctgaataagtccatgtacttttataacaacaggtacgtgggcttattttagtgcttaaaaatattgtcaaagaaatggtgatttcatagaacaaaaacaaggaggaaatgacaatgaacaaaacaatatatgaagcagaatttaccaaaatggtgcatgataagatgagagaagataatagattcaaagtatatgagagaataccaaaaaataggataggtggagattactggaatacatactggacaatccgttatatgcttcgcactatgacagatattttagaaaatggagataaactggtattattaggatacttcactgtaaagcctaaattttataaggaaagaacagcatgttctggaatggaaagaacaggaaaaaatgtgtatgagattccagaaagatataaggcaaagtttaaatctggtactgtgttaaatcgtgcttgcgaagcgtatggagattatctcaaagaagaagcaaataataaagatgatgaatacgaagaaggagaagaagagtaatgagatgtaaagattgtgaatatgtaaaatgctatgctgtcaataagaagatgtattattgtgataatagaaatagagtaaatttgatgggtaaactgggcgaggataatttacctgagacaagtcctgagtggtgtccaatggctgataggacaattgctgctgttgaaaatattacagatgggaaaggattagagaagtaatggaatcaaacaatacagaaatgaagatgcagtatattcttgatgaaaataaaaatctggcagagataccactaacagatatgctacctgtagagcatccgattaaatgtaaattaatcagtgcatttgaagtatttgtaagagtaccgcagacagaaaactattggatttctaattacggaagaggtgtaaataaccatagaaacccaaatatgaacaaattctatgagcataagcaaggaaaatgccattatactatttatgaagtgtggcgaacaccagaaaaaatcagagggaaactaacaggcaaaatcatagttgaaaccactaagagagaaaccagtccagaagagttagtagcaaaatgctttctgaaacaatatagaggcagaggtaaggtctggcataagaatggtgactttgatgataattggtataaaaatctgatttatgttactggcaaagatttcataaatcttaaagcagataagattacatggcaggagttaaactatgagcaggaatatattgagtatgtcaacaatgccaagaatcaagcaatgattgcgtatggttctatttccagtcgatgtaaaggtgaaaataacagtgagagtgcgcacaagtgttatgatgatgttgaattgtgtcaagaatggaaagattatccgcagttatttgtcaagagatacttggaattatattataaagtaccaggcgaatcaatggctgtagacaaggatttatttggtaatggaagcaaggtatattctccagagacaatctgtattctgccacaaggcttaaatacattacttgccaacagtaaaaagcattataaagatggggaaacaccaaacaatgtgcttcctcttggagtaagatataatggtaaagtcaataaatattacggacagattacttattttggtacagaagatataattgatttaccatatagggatacaatagaagaagcatttgcagattataagaagttcaaagaatatgacattgcaattacggtgtcaaaatacagagataagataccagaatacatatatgagaaactgcttacggtacgagtagaaccgtattaatatattataggcatatcagggagcacaatccttggtatgcctatttttttacgttttatatggctgctgccgagcggtactctttaatgtaaaactaccgcccctataaacacgtatattaaattttaagaacgaatgatgcacacatgagaaaatcttcatacgctatataaaaattcattataaagcgaaatacaagctttgagaagcattctgagaacatgatatattatcataaaggttgatcttcatcagaaggaacatagacacaaatatcctgtatttgacagtgcagaatacggcataagtcattgactgtcttcatagaaatgtcttggttatgtttaagacgatgcaaagtgctatgagacatatgatgcttgcttgtcaaagtataccagttttcatttgttttctttaatgtttcccagaatgggctgtaatctatcatggctgttcctttaaagatatttgatattattatcataaaatagattcttatacttgaatatcttcgtaataacgaatataatgtaagtattacagaaatgtgatagtaagtacgaaatgtcgaacaaatttgacaaaaagaattgcatattacatatagcagtagtataatcaaattgtgaattttatgtgaaatgtttatacaatcaaatacggcatagccagagaaatctggtgacgcaaaactacagggtctaagcgaatgtatgacagccagttgcaactatgataattaaggcattgcttcaagtatgtttggggtaatgtcttttttatatacaaaaagatcaaggggatatgaacatgaagaagaaaacaaaattattagcaatgtgtatggtagcttcattatcagtagggacgccagtgataacatgggcgagtgatactgaaacaactgagcagaaaagtggtgaatcagattcaataagtatatctgaaaaaggtgcagagacatcaatatatgaagataaaaaagtaacaattaaaatggattcggcagaatatactttagatgcttctgatatcatattaaatatgtctataaaaaattcgtatcctaatattttgacgctgaaagtacaagatgctaaagttgatgatacaactgttgcatttcaatgggattctaacgactataaggcaggaacatctttttcttctgcttggtatattatgcttgaaactttacaagaagtaaataatacggactttaaacaattgtcatttactatggtagggacgttgaatgatggtactgaattattaaaaaaagaaattaccatagcgagagaagctttcaaatctgttatggatgaagatgatgaagaaacatctgactctgaaagtacagattcaaataatgctacatcagaagcaacagaagaaaagtctgatgcaaaaagtgattctaacaaagacagttctgatggtatagaagaaagactttctgctcttgaagaaaaacaagcatctcagaacgaatctgataaagagacagtacaggaagaaaccacacctgctgctgatgcagaagaggaaaaagccaaagctacagaagatgaagacaagtcaaatgaaaatatacagaaaactttaattccagaccaatatattgaaaaagaagaggtgtttggagacgatggtaagttatcttttacatatcaatatgaatatgatgacgaatatcggttaattgagaaacaatgtgtatatccagatggtaccgtaaacaatgatgaaaagtacacatatgataaagatggcaataacattagaatagatcatgaggacaataaagattcaagctattcatattatacaattcataagtataaaggcgatgacttaatagaatcaaccacgtataatgttgcagatgatagtgtaaaatatacaacgtcttattcatatgatgataaaaatcgtttatgtcaagaaaaatttgaaaatatcgaatatgataatcaagctaccacaaattatttttatgatgataacggcaatattatatatagcgaaagggacaatgaaagatatgaagattacacgtatgatgcagatggaaatcttatatcgcagacgagaaacgatggtacaagaactgagtggaaatatgaaaataatataaaaatagaagaaaccttttatcacaaaggggatttcttatatacaagtaaactggaatatgctagtactagtccaagtgctgctgtaattaatgatatagaaataataaaagtagtacaacaggctctaaatgatatgggatacgattgtggtattcctgatggtatagttggagatggaacaaagaatgctgtaaagagttatatggaaaataatggaaaagcttccaaaggtgaaattacagaagaattagtgggaatgttaaacgtaaatgacgagattaaaagtgcaaaagaattatccagatatcgtacagatattagttatgaaatgctcatgagaaatccagtcgattatataaatacaccagtaaagttctctggttctgttgtccaagtgattaatgaaggagggggaaacaatattagactggcaattaattcagattctagtcaaacaatttggtgttcttattcaagactagatatgagcggcaatttgatggaaggagatcaagttacggtgtatggaattgcaatgggaacagaagattatatagcaatttcaggtgagaaaattacactgccaactattacttgtgaaagaatggatacatcttttggaacatttgagaaattcccaggattttaatattctaaaaatttttatttgaaaataaaaggagaactaattacatgagaaaagtaagaaaagtattatacgttttgatttgtgtaatcatggttggatgtatgataaatgtaagcaatatacaggcttcaacttcatcaaaaatctcaccccctaaagtagtattagtaaaaactacaggaacttctgaaatccgaattaaatggaaaaaagtaaatggtgtttctggttatagaatctatagaaaaaatgataatagtggttggaaagcaataaaaacagttaaaggtgaaaatgtaacggcttatacggataatggtttaaatcctggaaaacaatatttttatactgtgaaagcatacaagaaagtatcaaattcaaatgtttggagtaaagcgggtaaggagctttttgcagtaactaagatggaaatgccacaaattaatgatattgattatggtcatcgaacaggaaccgtagatatatcttggagtaaaagcaatggtgctcaatattatgaaattttattcaaaaccccaaatagcaagtggaagatggttgaaaaaagcaatggattaaatgccaagcaagtcccatctaccatgggagaaaatttatatgcggtacgtgcgtgtgttaagtactctggaaaggtatatcgcagtggatatgataaaaaaggaacagtatttcaatatgatgaatatggaaatcctaacgtagattattcggtttttgatatcataaatccagagaccacgcaaattgagatgaaaaaaggcgaatattatgaattaaaaatagacagtgatttggataaattatcatgctctgataataattcaaatataactgattcctattttaaggatgcaacagacagcgattatttgttgaaaattcacgcaataggaacaggaactgcgacaattcatttatatggtacagactatcctaatgtttacaaaaacattacagttgttgtagaagaagataataatactcaattagtaatggctgctatgggtattcaaaaagcatataactcggctaagtttccatcttctttacatataagaaatattgcatatgaggaaagttttagaaatggatacggtgataatatcagtagattagttgtccatgcttatgctaaaaattcatttggtggttatggagatatttattcagtagtaattcgttctaaaacaaatacacattattctaatgcatttgaatataatggatattactatacaacatcagcattttctcataatccaggtatgaatggagtatgggtgaacaataaagcggcagtaaatatgtggaaatatttatacgagaagaattttgaaatcccatatgattgatgattgcggcaggcattcaggaagaatacattaaactacaaattttacaataaaaggggtaatcactatgaagagaatgaaaaagtttataggcattttattatttgttctgacgtttggacttgcaagtacaataacgattccgcaaattggaacttgcgttgatgtacaggcagcaaatccttttatacagaaaaatgttagttattatttatatgaaaatcaaagaccgtctggtggttttatcattgtttatgatcctcttccaaacggcaagatatctaacattaaaaattccaatccaaatgttgtcaaagtcgaattagatgagcagtttggagctataagggtgaatgttttaaaggaagggacttcaaaagtttctttccgatatgcgagaaaaacttttacacagaagattacagtagtgaaatatgaagatccttgtaaatcatttaaaataggaagtacgaattatactaaatattttaaaaaatccagacacttcaatcataataatcgaaagaaagatattacagcaactataaagatagtaccgaaaaaaggatggaaattaaccaagatagaagtacagaatatgtatgatggtacaaaaagagtaaaaaataattcaaaagtaaccttatccattaaagggacaggaacaggtttatatgcttattttaagaatactaaaacaggagttgtgcaagtgttaaatcttggatatggtagtgggaatttcccaaatagaaattattatgattgagtagtaaagcagcagacgttcggaacattcaaattttacccgtatcatgagaattgaacacatcacgccctacacgccacacgccctttctacagaaatgtaaaccacccgggggtgtgtctcccctatgtcctggtacttcaaacatttccagagcagacagcagagatagcacaacacagcaccagagacagcacaacagcaccagagacagcacaacagcaccagagacagcacaacagcaccagagaatacacaacagcaccagagaatacacaacacaataaacagtattccatcatgtgaccgccagaatacaaaaatcttataagcttctgaccatcccaccagacagcatggagaaatagcaaagcccctattgcttgtggagatggacagagaacaccagacagaaacaacagcggatcacaggagaagatacaaaagtataaccgtccagagatggacacgacaacacacaacacacttaatataaaaaggctaggagaatcacacacataattctcttagcctaaattttttctgtactggatagtattacaaataataatatataataaatatcagatagtaagaaacacaataatacaatcggaataatataacagaatcaccagacacaacaccaaacataacagcaccagaaaacaaaaatcctcacagagacagcacagaaccttcacagcaacacaatagaaagctacgccccagataaccagacagcagacacagagaaagcgcacagatacagaatagcatgagacaacagcagatagcaaattgctttatgatctggcacactggcagagaatcatatagacacttgctcaaggttctgtcattgctctgtgaccctgtcaatgtgtcaaatgtgccttgcttcattcagtcacacatcacataactgacatactgatatatatactattatacataatacatacattatacactgcactgcactgtacgatacatactattatatacactatatatactatacctgcacacactgttatatactatactatatagtataatgcatatatactcatgcgctcatatactctgatgctaccacaccatcacatgatctgttattactccataaagatatacacatcacacctgtatatgcgtcaccttctgccatgccttatattataatatatcatacatatataatctgattcagaagcaggatagacaacagcagacatacggcagaaggacataaaaaagaagcggtatatttcaaccgcctctgtatcatttaccaaggatataattgactgctttctctgctctactgcttgcagatacgataaacttgttatcattcttcaaaacctgtaaccagttctgtatatatgctgttgagttcttaaaggtctgaggtgtttcaattcctaacatattcatgagtgaagcacttccaatctctgcaactaattcttctttgctataggtttcgcttccaaaacttgcaatggctcctgtttccaatctgtcgagtctacttttatgtcctgtgctatgtgtcagttcatgaaatgttgtgctgtaatactcattgatattttcatactgttctttcattggtacaactactctgtcacaggatgggctataaaaggctttattgcttggcagttctttgaagtcaagatgttcacgattcacatacattgtgatgatcttgtctgcttcttctattggctcaacctctttaaatggtacttctaaaggtttcacaccttccacctgtgagatatgaaagacgttataatattttaatacaggtatctttctgacttccttttctcctgtctcttcgtttgtttcttctttctggtatatcttccagaatacaacgatttctgatttctcaccttttttaatatgtccacctaagtctgaccactgtttaaatgttgcatatgatccagaatgtttcagaagaatctgattgataatgctgtaaggtttctttgtaattctgttgtatgctcctgatctaactcctgtccaaggacgtttccaagggatgttccctttttccagttctgcaataattctatctgttaccatttcatatacattttcttttgttgtcataactaataacctccatcttttgtgcatcttttgtttggttctgttctttttgataaggttattatataccctaaagatagtgatggtcaatatacaatatcactagatttaggtatgcttttttatataaaatgtaacaatatttagggtataaaaaaagaaagaacacatataaatatgttctttcctatttttttgcacctcgttctgatgtgtctgaatatccttctaggtctttcacacattcaagtaaatcacctggttgacaatctaataacttacacattttgtctaaaaccttcatatctatagattcaccatttaaaccattgtttttaaatatttttgtaatggttgctgatcccagtattttttcttgttttaatttatattgagaaaaaccattttcttttaatttaagaactaacttttcataactaatcatgcacttcacctctatgtaattttaccatatatttatataaaaatcaactataccctagacattgtgcagagtgaataaaacgtgtgccaaaacataccctaaacattgtgatatttgtcaatagacatcactacatctagggtatataataaactcatcaaatgaaacacagcaacacacaagagcaacagcgaagggtgaaaatgaagtagcgaaagcacaccagagacactcacataacattggataagggtaagcaaagatacataaagttatcgagattggtttaagacctgccaaggctgatgctcctacaaaaaaagaaaatcaaatttcaggaggataaagaatatgtgtagaacaatgaaagaattacagacaatctcagaaagaatctatgaacttgaacagaagaaagctaaaaagaaaaaagagatggatgctcttgaaaaagaaattaaagaactgaaaagtgagacttcttcctatatgaagaaacgtcagaaaaacgaattaacagttgcaggtctgacagttcttttcacagcatttgtaagatcttcttttgataaagatgcattcatcgaagaaaacggtgaagaaagctataaaaaatattcaaagaatattccagttgaaagagtcactgtaaaagttgcaaagagtaattaaataatgagtggtcatagccactataaacagggctttaagctatgagcgttcccactcttacagggtgggaggtagtcaaaagaacaggaggacaacagacaatgacaacaacaaaaattacagcccatacatatgtatgtgaattaccagatatgattcagaatcaaattcttgcagaatgtgaagagactttcaaaagtcttgcttttccagtagacattgaagaacaacttgaaaacgttaaaggctgtaagatgtgtgacattgaggacacaattgatgttcaaaagtattatacaagatcataatccactgatgagtctttgagaattaagacgaaactccccatataagggagtctggataacataaatcaaattcgctgtcctaacggcataacggggagaaagaggactaaatgaaagcaaaatcaatcaagacagtagaagtaaaagaaatcggagccattaatctgaataacattgaagcagtcaatgggaatcttctggtacatattccaatttcacatgcaaatgaaggtttagaagatcttgtgaataagttgtacaaagactttcttgagaagcatccagacgttgacgaagaagaaatctgtgttgatgtgaatgtacagtatactttcggtggatggattacagggattaattcagattttattcttgacatttatctctggcaggaatcaaacgaggatgtagtagaagattacgatgatattccgctttacttaggcgaagagggaacacgtacagtaaagaaacttatctgggatgcacttggcaaaatgcttctgaacatctaatcatatggctgtgctatcggcatgacgggcaaggaggacatacagaagtgaaagacaataagaaacttagaagaatcacattgatacttctgattgtaaagcttgtatgtgacgttatatcacttattagctatcagagaaaggatgattcaaccaaacattaacagataagtaacagggaggacggaaaccatgagaagaacagaaacagtgatgacctatgaccagtgggagcgcagatttaagagacaagtaaaaagatatgtcaagaggaaattaaatagagcatttatgtatctggttatgttcttcctgattacaatgcctatctggatgtttatagattacatcttgagagggtattgaaatatattccttctggaacattggaaaggaaacagacatgagaaaacttgcatgtaaaaacggaaacattgtttatgttggaacgcaggaggaagtcagaacaatacatcatgctatgtatcgtgcatggctgaaagataaaattcagataacaccaacaggttattttacatatgaacgtattcgtattgagggattcaatctgattcaggggatattacttgataagagagaaggatattttgatcctatgtcatttgatgaaatcatggaaatgttcatcaatggaaaatttagaacctattagacagcaatggaaataaatcagaaaggaagcgtgagcagaatgagtaagaaagacaataaagaactggaaaatacaaaagtcactggaacatttgtagtggaaacagatcatggcattgtgactaatattgcatatagtgccatcatgcagccgaatgttaaattcagcggaaaacctatgaaatggtttgatgatactaaactgttaaagaagaagtaaaacggaaagcggtcatttttgaccgttattcgttcagacaacacaacataagggatgggaaaatataagagcgtgagagccaaattattccagtaaagagcggaaagagtgatggaaaatgaagcagtcacctaaatatgcaggaaaatgggacaaggataaaagaaatctgaatagttactttcatttcaatgatggaaactatgcggaaatagatgagtgcgtagaaagttttgattttagacgttggctcaaggaaacagaaatatgtaaaggaatctgataagagaataacatgagcgaagataagaaactgaatgaggtcatcagagtgaagaaacgtccaagtaattttgtaatgatggataagacatttctggaagatgatagattgtcttataaggcaaagggattattggcatatctgctcagtaaacctgatgactggaaggtgatagttgggaaccttgtaaacagttctaaggacggaaaagcatctgtatatgcaggacttaaagagttaaaggaatgcggatattacgagaaagtacctgttagaaatgagcaaggaacccgtatcatcagatgggaaagtacagtgtatgaagtgccgatttctctacttaccgattttcaagaagtagataatcaagataaaggaaatctatatcaagaaaatcgggaacgtaataataattattatactaataataatattactaataatcataataccagtctgtctataaatgatgggacaagccagttgaataaaacgcttgatgcaatccatgagaatattggctatgagcagtttaagcagacatatccaggtgatataggattgattgatgagtttgttaatgtgatgcttgatgtgcttctatctgagggtggtgtgatccgaataaacggggaagtaaagtcaagggaactgatacaaagtcagattgccaagttggaatatgctgatgtggaatatgtcatgatgcagtttaaacagcagaaagagcgtatcaagaagaaatcacagtatattctatccatgctgtatcaatcacgcttggagagaaacgcacactatacaaactgggtacagtcaaatgagtgaaatcatcactgtgactgatacataaagattattgcaacaatgcagcagagaacatatgggagaataattggtggtattctccctgtacaataccatatagagaggaaaattatcatgagatcagaagatcagagaatcattgaagaaatcacaaacaaagcagtaaagaatgcattagcggaaatggaacaggcaaaacctaaacctataaccacaacattaggatatatgaatgtaacatcagcggaaatagataaatcaagtggaatggaattttatattaatgtttcagaagtatctgatgcatggatagaagttatccagagggctgtttatattgacaaatttaataacaaagaagccaacagatatggtgctgattggtgtgatgcaggagtgaatacattaatacgtttacatgtaacaattaatcctagttggaaagtatctatacgcttggaagtttactatgaagataaggaaaaggattacatgtttggaacagtatatttcaaagttaacattgctgatgatgttgcattaaaggaaattattgttgatgcaatcagaagcagattgtctcagtaaataagataggaaacagagaaacatatacatatgggagaatgcttgactgtgttctccccgtacatgaacaggaggattaagaaatggcagtaaaatatccagaatttaatgaattaaaaaaggaatcagcatttgactggtcagtaaaatcagagggcgaagattttaaaactaataaagcaattatcagatttgatatgttcactcagaacagaaaagtaagcatctcaaatgatatgaagaaagctatcttgacactgttaaagaagtatgtagatgcagaacagacatcatatgcagatgtaaccattaatgtagagttgcagaaggtatttgatcgtaatagcaagcggaaacctaaaacggaaatctattatattctgtgcgtaactgttaagaaaatgaatggcgaaacttgtaatctgaaaaatacaatggaaattcacaatgtaaaaggctctggattattatataaatcctgcaagatttatgcatatgattcgttgaaacaatttattcttaaataaagatggaggtgcagcagacgtgattgtattgactaacggacagcattatattactacggacgcttctggaaagattaagaagatacaggacattgagaaagcacagacattctcttcatgtaatgtcgcaatgcaaaaagtgatacacaatccaaaaaaatgtaaaggttttttcccatatgatacagatgatttcatgaatgatccgcttgctgataaaaatgctactaaaaagataaaaagaaaaaactatactgcttatgagagggaaatgatttatcgcaaaggtaactgtaaatgttatctgtgtggaaaagatttactactgtcagaaatgacattagatcatgtagtgccattggctaagggtggagcggattgtttagaaaatctaatgccatgctgtaaagaatgtaatcaatggaaagcagatagctactcaggtgattttgggaataagataagcaacatatacatgcaccagatgaatgataagattggaaataagttcatgtggagatttgtaaaaaggtatctggataagcaaatgacagagttatacagtagagcataggatcaagcaattcatagtataatagcaggaattaaaagcatagataatatatattaattcatgccaaaatagtaggaaataaactattctttgtgatatctgacagtattgcaaggaatagttttactacatatggtatatagatatgggatattatgcaaacttcgagaaaagtcagtaatagcaagggattataggatatttcatagtaaattagtaggaattaataaggcgaaaaaactgactgcgttaaaaatacaatgaaaaacgaaattaaatacgaactattccacgtagtatttgtgtattgcagaaagatagaaaaagtgctgaaaagccttgatttataaggctatctgggattttacagtttataagaaatagtttgataaccaaagtaaatatcagggattatagttcgtgattaaaatatttttgagttacaagagagtgacagtacacaatatatagtatacaaaacacaaatcatacacaatatatagcataccagaaacgaattacatacaacatacgcatataaaacacaaacatcatccctgctgcaacatcaacacattattattcctgcttataataattgtcaccaagtgacaaccgatgtgaaaaaatagctcttctccaaatggagaaaagcgaaatagtaacgttttggtagttttaccagaacgagtaaaagggttctccaaatggagaaacctttaaataaaattcagtcaaacggacagaatcagttacaccaattctggtggaagcgattgagacaaatcgcctttaccaaatttggtaaacctgattgactgaaaatcaaggtgtgacaaaatcgtcataggatgataagtggacttcccctaaaattggtgtaagtccaagtgaaacagattcccccaattctggtggaaactgtaaatagcctttgcagatttcttcaaagcctttaccaaaattggtaaaccctattagtgaacagttttcgcagatttcttcaacaactgtcgattctaaaaataaaattgatgtacgtgctaaattagcagaaacagcgggtgtatcaactgatacatactttaaaggaaagaagatattggattcaaataatgagaaactaaaacaagaagttctttcaggtgaaaagagcatcaacgcaggatataaagaattaactggaaaaaagagaatcagtatatataaccgtttccaaatttggaaacgctgcataacgagaattgtgatcacatctgactccacaaaactgtgtagtgaaacaatattcaaatctgaacctgattcccaaatctgggaacgctgcatcagttcacagaaatactatagcagtcattctatgaacaaataacaaccatagcatcaccaaaagagaagaatctatataggaaactattaactatccaacagaacaggagaatacaaaatatgaaattgattgacggaactgtaaaattaaataaaaaagttattaccagtacattcctgttacatgatgctatattggcgtatacaggtttatgtatagcaaggtcacaacttgataaacaatattgcttgtgtatttccatagaggatatagcacattatttaggattcaaaaaaattaagtggtatgcattgcatagaatcagtagaggattgaaaaatctacaagaaaacaacattattacagttgacgaacctaaaaataaaaaaaggttaagacatcattacaaagagaaactatttcctaggttagaaaattattatttatacgaaaaagaattatatgcaaaatcatatattgatattccgatatcatctattaatatccttatgtattcaaatgagaaagtaaaagaatgtattccgttactcagatactttattgtccttattggagcaggtggatattatgcatctgacagagaaaggcttactcatcaatatgcaggaatcttatcaccagaaatttgtcatagatataatcaatttttggagaatataggaataatacaaaaggatgcttcttctgatatgtgattaaggaaaacttggaaagcggatcaaggaattggaaagattgtatggaattaaagttggaaaacctaattacgaaaaaaattcgcaattaaagacccaagagcatttagcttcagatatgggaatggatgtccgtacccttcaaaattacaaacttcttgcagacatgattcctgaaatcaagaacaattggacaatttgtccagtactggatttcagtatgtgacattttgtcaagcactcaaacagtattcacactagatggtaaaaactatatctgtattcgccctaatggagaatactataacaggttatcgtcattcacaacgaaaactatataggtattcgtcctgatgaagaaaaacatatatatcattaaccataaaaggcgaacgttcttcataaggaagaaccatacaaccaataacaccacattataataggaaaggaaaccgaactatgaaagattctattgtaatattttccgctacaagagcaagacaattattaaaagcaggatttcagattattgatatcaagcctgatcgtaaagataaaacacatatgagatcagtatttgtatttcgatatgatgagagaatacaacaatatctggaggaaatgtgatatgtaaatatcaaaacaaatcaaaaaatatcaaagttttactctttagagtatgtaaaatattatctattacttattattatctattacttataagtcttacaaatgtattgatttttatatggggtttgttagtggggttactaacaaaccaaatcaaaaaagtatgacttttgttagtctaggaaaatcttaaaaaatacccgtaaactacaattcaataaaaggagcacaaacggatgaaaaatgtagtctttttaaacaaagcaatcgtaaccagtcaagacttatctcacaatgctatcttggcttatgtaggacttcgcatgattatgagtcgtgatgtcttgttatttggtgaagaatctactatagcacctgtctcattggcaaggatagcttatgaactaaacgaatcagataatgttgaaaaatctttgatggatgcgattaaaagtggtcttatggaacttaaagaaaaccattggataacattaaaggatttctgcaaagaatatctggtggatttctcaaagctaaaaattgatacatcaaaggaattttttattagagtagaaaactctgagataaaagttattatgtcctccggggaacagacaaggaaaaagattccattgctgagatattttcttgcattgattagtacattcaatcattccgattatatgggagaaatgtctggtaaggttggcggtatgtcaatagattacatagcaaatcaagcttgtattaataatcagatgacttgcatccgctacaatgaaaccttagagaagttacatctgatctatgtatatagaagcaatgataaaatcaaatttgataatagcttgaagcaaatcaataattgctacagtagatataaggatcgtgacctgtgtatcaaattcgcaacagattatgagaatctatacggatatgctcatactattataaaaacaaagaaacgtaaagatgaagcggataacaataggcggtatgctgcatattacaatcagatatgtatgggaactgaatattctattgaaatagtgcgtcaagttaaaaagtatattcataataagaacacatacttgcaatctgaaattgataataaatatactccaaagcgcagtacaccattatcatatagtgagcgagaatatgttgaaaaattaaaatctcaattcagggatgaagcaccgattgataagcttctggaatcgttgggaatcacagcggaacaatggggagaatctgatccactggatgagagtgaggatttgtcagaagaaatcgtatgaatatatataatataatctgttgtatggatgctctcaacatggtactataataaatagataatagtatcgggggaacatacaaatgaaagagcttatagattttttacaaagagaattttcagatgatgcaaaagaaatacagacagatttacaacacatatacaattgcatggataaggtacattcagaagttgataagagattgcctactattaagggagattataccaaaattggagaatattatgcaatggggcaagaactaaaacagattaaggaaaagataaaagagatatgcgatttatttcctgagtctgagagagcaggtgctatagatataccaaaagaatcagaaataatgccggagaagttgtcagaagtagatgtaccagaagaatctcttatagataaagatgaagaggatgagatatctgcaaaaggcgggagagttaattatgctaattatagagtagatgatacagttccgcattttttatcagaagattttacgcataaaagacctgtagcatttgaatttgacggtactcaatattcagttaaggactggaaacagtttttactgatgatttgtgaaattatgtataataagaatcatgcacaatttgaatctattgttatggaaaaagatatgcagggaaaaacaagagcatatttttctaataataaagaagtatatacggcgatgtatgatggaagaaaaatttccaatagtaatatatatattgaaacaacacatagtgcaaatacaatatgtgacattgttagcatattatttagaaagtatcgtattccttatgctgcgctacagatatatttaaaagcggattatacaccgttacatcaagcagaaacagagagtaaacctgataacaatagatcagtaactacgaaaattgattctaaatcaagtacaaaatctaatccagatgattatagatttataaaagattcatatgtgaaacaatctgatcctgcaatgaatggattatctcagagaatgggaacaccttctcatttagaatatttgcatatgaaagaaaatgatacaaaacgtcataagagcagatgtatagagtatgataacaagaaagacatttgtatgtgtacagattcagcaaattatttattgaaatgtggtggatcaagtcactgtaaatattatagggaagaaacattaataaaaaatgatgatacggaatctactataaaaaagaaaccagtaataaaagtaattccaaagaatgatataaaactgtgtcctgtatgcaaaattggaactaaaaaggaatcattaattgttaattatttggaaaatgggaagaacaaacggaacttgttgacatcatatcattgtgaagtatgtaaatcttcctatattccagattctttatatcgtacttatacagcgcataaagataagaacaatatagatgtggaatttgtaatggaacaggtagcacaacagtaggataacggaagggaactaaaacagtcatccgtataaccatccccgtccttcacagaatcaattctatgctgaaattccttatatatagccttaaattctggacgaaaaccatctaccctaacaactttacccttgaagcattatcgttgaaatttgatggttattttattaatatattgtgaagaaatgggtataagatgactgctgctgtaccgatatctatatctgttttgtcagaagcagaaaaataagttgctgaataggtatcatctatattataatatgtttatagcaaaacactgggaggtgataatatgccattacttaaagaagaaacttatactatagatgatatatatgcattaccagagggagaaagagcagaactgattgatggtcatatttactatatggctccacctagtagaaaacatcaggagatatcaggggaattgtatgcagatattaaagagtatattcgttctcatggtggacgatgtaaagtatatgcagcaccgtttgctgtatatctggatgaaagaagtaatacctatgtagagccagatatttctgttatctgtgatccagataagcttgatgacaaaggatgcaagggtgcgcctgactggattattgagatcgtatcaccggcaagtaaacagatggattattatacaaaattattcaaatacaggaatgcaggagtacgtgaatattggattgttgatccatcgaaaaatctgatcgtcgtatacaattttgaacaaggtgagacggaacaatataccttacaggattctgtcaaagtgggaatttatgatgatcttgtgattgatttcggaagtatagaattataagtgataatatggcaaaacgtgtaaaagaatatatgaatgcagtaattgaaacattacagacaaaatataatatgactgaaattgaagcatacaaggctgtgaaatcatcttttttgtatgactcattgttatattatgtagatgaaaccatacatgatgatattgaaatgaatgcagatttcgtatatgaggattataataatccagaattgaaaatgatgtaagtagcagaatgtgagattctattagaggattaacatatgagtaagctttttggtagtgcaatacagggactattagaaactgttgcaattgaaaaaggtagaattgcttcaaaagaagtaatcagagaagcaccaaacagtgagactatatcagcaattaatgaagtacaacagatgaagcagaattcttctcttggaaaatcatatacagatatagacgggatgatgaaagatttattgtcatattgaaaaaatccattaataatctgattgcttgaataatgtaatcataatttaatatgagacagcatgaaagccctcgggagttaatcctgggggcttttggtagttcgttgatacacaaaataggttattaataaccttgactttgaaagcgtataattgtattcttaatgtatatgatatgaaatggagaaaagatatggataatacgaaaaaaatatatatggcttgtgacattataagagaatatgtaccctataacactggacatattgttatagatgcaattgctttacttttattagttgaaaaagaaaatattgcgttagatcaaatttctctctctatactgcacagttcccaacataacgataatggattgtatcgtgagttgagttcagaaattataaataaaaatatacctattcctgttatggataaattattctatcttttaatggaatatactaaagaagaattaaaaaaatgtgcggatattttacaggataatatcatatttccacccaatatatataatatcccttctgcaaaatggataaatgatttaattgtaaaaatttttaaagaaaacaaaggagatattttattaaatttagatagcagttctggaagatttttgactattgcacatgattcgaatattgcaaaaaagtatataggatatacatttatatatgaagaatatattactgcaaaagcctatgtatatataaaagaatttgatgagtctaattcctataaaacaaggattagtatatatgatcagaatttcaaagataacttattcttaaataaatatgatatgatctatacaataaatccatttggagtaagacgtggattatttcatgacgatgttaatgaaatgtatcatatgttacacttatctacagatgataaatatttcaaatcacatgtagaaagatactctttaagtatgcttggtataattaatggtctgcaaatattaagctctaatggtattcttggtgcattaattccagatggaggattatttaactgtacagataaggatataagaaagtacttaattgaaaagaattatttagatacaataatattcttacctggtggaattataccgggtacaggtgtgaattgttcattattaattgcaaagaaaaatagagattcaaagaaacatattaaaatgataaatgctagagagctttatgaaagaaaaagaagacatttagaatttacagaagaaaatattgaacaaatctttgaatggtataaaagtgatacggttaatgaaaatgtaatatttgtaagcaaagaagagattgcggagcaaaattacaattttgaatttaccatatatataaagagacatatcttagaaaatgcaacagcattaggtagtgttactgaaaacatttttcgaggatatcagattaccgcaaaggaattggatgagatagtgtcattagataaaaatgaaacacaattttatatagtaaatgtatctgatgttcaaccagaaggatatattgtaagtaatcttcaaggtattagatcagatgtgggtgataaattaagtaagtattatttagaagatggtgatttgattattactgcaaaaaattcaattgtaaaaacggctgtttataaagcggaagataataaaaagattattctgactggtaatcttattgtgattcgtttagataagaataaatgtgatccttattatctacaggcgtttttaaatagtgaggatggacagaatgaaataaaaagcattcaaacaggtactacgataaaggttataaatcctaaaagactagaagaaatgatgattcctctaaaagttatagaagatcaaaagaagattgctgcattatgtaaaaaaacaatacaggaaattcaagacttgaagaatactttatatgtgaaaacaaagagtcttggaacaatatacaaaagataggtttttaaaaacctaaaataggtattgcaaaacctatttctatgtgctataattcagaatgtaaacaagatacagagcagtacagagtaacataactgctctgttgatgggataacagacacattggaacaggtaaacggaacttaatcaaatcgtaacattataggttgacacaaacgaatgttcgggtgtataatgatgttacggataaaaagaaagagacaacggtatttggcgataccatcatctctatcttataggatgagttctaaactcaatccagtatgtattgtacaggcatcacgaatgaagtctatacttttccttagacaagaataagtatatcattaatttcatttttgtgcaagtctgcacaatttatttcccataaaaaaatttaagagcggcgagatatgacaggtaagctatgtacttttgtacatttgcagatcggtttatttcctgcacccaaatgtactatgaaaactgaataacaggaggatcattatgattaacgctgagaaaatcgttttcgagaagcagaactactatactccttcatggagtggtgtgactacggtaaagattcttgaagtattacccaaggggaaagtacgcgtaaaagcaggtgaatctatatttgtacgttctatacagtatatgttcaatactgctaaagatgcaaatacaagccgtagagcatgggagagttttgagagaaaacgcaagaaatctgcaaaaaagaacaaaaagaagtgataatttgaaacttggatttcatcttgattatatggatgaaatcaaaaatttttacctttcagtggtcagttatacaacactattgaaattgtattaccatcctatagcacactatggactaactaataaacaggaaagtgataaatacgggaggtgatttatcaaatgaacagattgggttatgtgattctaaagattttgaaaaagaaaaactgtaccagtcattttcacagcatgacattacaggaaatcatggaaatgtcaaaatcatgcagaacaacaacttctcgaaaaataaaaaaattacgagagcaaggatatgtagagcgtggatgcggagattggcaagcatacacatactacatcacagaaaaaggcttgaaattaataaagaatgaagaggagaacgaacatgcttaaagattcaacggcagttattggtttaggtttaggcggtatgactgtaacttatgagttccaggagagaaattatcttacatattcggtaaacggatcagaacaagatattaaaagtattcctaatgctaaaaatagtatgaggcttgaaggatatgacggtcttgcaggaaatagagagcttgcctatgaagcgttaaaacgtaacaagcatatattgaagaaacttaaagaaatagagaaaaaaatcaatattgtgattgcttctggaggcggttcatcaggatcaggatgtattacatttgtaagtgaaattctggtgcaaaatccagataaaattgttgttccagtaattcttatgccaagacaagatgagtcaattcagaaaagactgaatgcgtataacgtagcaaaagaacttatgcagattgaagaactgggtgccatcatctttgtaaataatgaagcttactcagatttgaaaaagattaatacgattctggtaaatatgttggatgcgtttttaagtgatacttcctattccagtggatcaaactttgatgattctgaaaagatgaagatgctgaaagataacggtgcatttgtgatcgctatgttatctgataaaaattcagagaataacaaggtaactacgtctgatatggtaaaagcattaactgtaaaaaatatttttcttcctatcaatgcagatggtattgttggaaaccttggaatcatcaatcaaggcaaaaataagattgacgagcatgaaattgaaaaagctattggtgttccagagaacatttttacaggatctaatggagcggtcaatatagcctgtgcatcaggattatcttttccagttgaatatattaaaaaacttggtaaagatgcttcggatgaacaacgtgctaggctcaatcgtagacaatctttaactctacttgatgatttagaagagattaaaagtccagttgttccagataataagtcagtaagtaagcgtaaacgtacaagtctggaattattggaagggttagattgagaagttacgaacaactatgaacaagtaacagatagggaatatacaagtaacctataacaaaacaacaagtaagaacacaggaggatatagtaatgggaaatctttatatcacagtcgaggaatttatgaaacagattggcagttcacacgtagatattgagccaagtgtatacggtggtgctgcaatgcagataagtaatgcaagcgtttcctatgatgatgaagaagaggaactgacattttattatggatgtaatgcaagtttgacacttaaaacatattgtattgacagtatcacacctgtaaatgatgaatgctattttattactttagaagagaatgaaatgagattcacagtaacaaagacaccagaaattaaataatttatacggagggtaagagcatgaacagagcagagagaagaaaagcagcgaaagagcagagaaacaataatataggaagaaacaccaacagcaagcacaattttgttgatatgggaaagtgggatatcccaataaatgaattaaaacaggatgagaatctgaaagatcctaacgcagatccagaagttatggaattattcaacgaagtttataccaaatggatgggaagtacattggtcaagaatctatattccaaagtgcttattacactgggaatggagtatctggacactttgacatcattgaaatttgacctgattccgatggaagatagagtctatgtcagagatacagtgtaccatatggcaaatacttgtaatttctttatgggtgcgtgtgccgatggtctcaataaatcattacaggattatattgatgattgtcacaaggcaaatagaagagaggttgaacttccttccataattaacacagggcttgaatttcagacattaccaaaggcagaacagattgatgatatgtatgctgattttcttgtaaagcatgcgaatgaacttgatccatatctgatactgataaagccttctgaaatcagaggtgatgaagagtatgtttgcaaagttcttacaatgattgtgaatcagtcaatcaaactggataaagagattgagattccatcacgtaaatatgtagtggaactttaagacacacagagaaatatatatcaatatcagtggatggagttgcatctgtccactgagagaaaggagagctatgtagtatgaatgataataaaatgattactcagtcaagaattattgaagagtatggatggacgaaaagtttaatcagtaaatttcttccagatccagtattgaaagcgaatcctcattatagaaaggctgctcctatgagattgtgggatgaagataccgttaagcaggtaatgacaacatcagaatttcaagatgctatggagaaagctaataagcgtaagaaatcagcaagtaaagcagtcgaaactaagtatagcaatatgaatcatagtgttcagttgtttatagattcaattactataaaagttttatcggatgaagaattaaagactaaggcactaaaagcaaaacaagagtggtatcaatgtcatccatgttctttaaatggtgattggattgatgagccatatatgaaaaatgcttatacagccgatgaagaaactatcaatcgttggattgtaaactatatcagacataatttggtaagttatgataattttcttggcagtattgatggaaaagtaggatcagtagaagcttatccagaagttaaaattgcggtacttgaaaaaattgctaatacatatccgaaatataaggatgaatgtgagagacagatattttttgttgatttcaatgcggatagataaaaggagaatcaattcatatgaatgaaaaatttcgggcaattggattagatacggaagataaaattacagagttcattgattatattgatgatttggaagataccgaagaaattaaaagtgatgtttatggattctttgaggaagagtcatcgtacaatgagaatcatatacctgcttatgttgtaatgacaaaatataaaggcaaatatatcgtttgggttgaagatcaatgctgcgattttgctataagttatccaccatataatttgtgcgatatattttcaacctatgatgaagctaacgaatattataagtcattggcacattctggaattaagcctttaagtgaacaagtagaagagtgtaagagccaactcatagatgaagttgatcttagagtgtcaacaatggtgccgaatgttcttaatattaaggtgtggtataaaaactgtttaattattgaacatctgacaaagtttgatgttcagtatatcaacaatgcaataactatgtttaatgatttttgcgaagaaagagacataaacatttgcaagatatataaaaacagaaacaatcttaattatcaaagagaatatgttgttgaatgtcaaaagaaaaatgaagatgcaattcacatatatcatatacatattccaagcgtttatcaagggcgggtacgatgtgcaattgatttattgaacaatgcaaaagtggtggaatcgggatgtgtaattccatcttccaattgccagatatattattcgataagaaaaggggagaactaacaaatgtacggaactgttaaatattacaatcagcaaaaatgctacggattcattggtacaagtgatgggaaggagtatttctttcatatcagcggtctgaataagaactacggcggtaaaccaaatgctgatgacaacgtagaatttaaggtaagtgagccaaatgataaaggatcagtgtgtgcatataatgtaaagccaattctcacattaaacatggtgcgcaaggcattaggtaaagagcatcttcatctgaaatcaatgaaagatgaatacggcaatagacgttggcttgtgctggatgataacaatgctattcaaacatctgataagggtatgtcacttgaagaagtttgggattatgtaaatgattgtcaagaattattagatgatagcatgaaatatccatgtggatgttaggtgtcaccgaagtcgcagaatatgcaggatttgaaattgtaagagaataagaaaaggagaactaaaattatgtcaaaaagtattatgagtggaattatgaaagaaacaggtaaaaaacttgagaaagatattgctaagaagcttagtggctcatgtggtaaatactataacggtaataaaaagcttcagagcatgatttccaaagaagattttgccaatgttattaaaaatgtcaacgtgagttttagaaatgggaatctgaacgtatcagtaaatccaaaagatggagatgctgtttctggtgacgataagaagaaatttgatgacttatgcaataaattttttgaacaggcggtatctgaatattttgcagagaactaatcagaaattgtgacagagaaataagtagcataaagatatattgagtaaaaaggagattagaaattatgtcagaaaaaatcgtagcaggtattggactaatcattgataatcaggaaatcgaaaaatgtattactgagaaatttaaagcttcatctgatacatattacagaaatcataaaaagattcagaatatgatttctgagaaagattttatcgaagtgataaatcatgtaagtgtcagatttgacaatgaaaatatgtttatatgtatcaattcaaaaggcttagaccttattgaaccagagcatagagctagaattattgaagcatgctatgaatatttacatagaattgcttcggaatattttaatcttggcattgatacaggaaacaatgcaagagatttaaccaaagaaaagacaatagaaatcatttccgaagaaacacgtgcaagtcaagatatatctaaacatgtagtaaatgctgtagcagagaatttggatgctttaagcaaaggtgaaaatccgaatacatatgtgacaaatattttcggagacagtttgaaagataccacatatgaggctgcaattgagattattgctaacaagtggactgatctcactaagagtgaaaaatcaattcttgcggaagaattaggtggagtacgaaataaaagttatgtaatagccttatttggccatgtaacagagaattaactaatatatagtacattgcatcggtattatctggtgcaatgtaccactcaaaatataggagcaaaaaaacatgaagagaaatacaacacctgagaaattattggatgctattaataataagaagttatccgttatcggtggcaagatctattcagttgatatggtaagaaactacccaccagatcaatttgttgaagaattagagttcctttgtgaatcaggatgctttgcagagatgattgatattaaatatgaggttgctgtgggacatgtattgttagacattggacggatgtgtgcaaaggatatctatgcattaatgcaacttgacatcgctgatggtgtcacaccacaagagattaaagatatgctgctgtatacagattactaaatgaaatagagaactaataggtaacacgggttcgattcccgtactgattatatatagagagaaaggaaaaattgaaaatgtcagaagagaagagagtattaacaggagcagcaggaacagttaaatggttcaatccagaaaaaggatatggatttattacagcagatgatggtactgagtattttatccattatacaggaattagtattgatggaagaaaaggataccgttttctcaaagagaaagaagttgttaagtttgatataggacagaatgaaaaaggttcatatgcaacaaatgtaatcttagcttaaccagaatgagcaacagagaactatagaacagataagaaaaaggagatcataagaccatgaacaaaattgtagaagcagtaaaagaaagaagagaaattgagacaaaggatttattcagtgtggtgaatgatttttgccttacaagacttgcagttaagacatctgatggtgacaatattgtatctatgcaggtaaataaatgcgaagaatacgagaatgaatatgaattttctcagacctgtattggctttgatggtgtagcgtatcatctgaaaaaggacgatatcatcagtgccgaaggtgaatacaatacagatgcagatacactgtatattacttgcaaattgaaaaacagtttaacagtatatttcatgattattaatgtatctggaagcgaaaaccgcacagataagtatgatgagatggatgtatatcaactgaatgacttcttagaggatgtgctgcatgagaaaaatgagtattactgtgtattcaccagaatcacagatgtctttggatttgacctgaaaatgcgtaactgtatccgtacttatgttaatacactggatgatagtgattggaagttacatatcagtgatgattttacatcatttgaagtgcctgtaactgatgattcaatcaatgaaatctatgttaaggataatgcagaatccagatcaatcattgttaagccatataatcagccgttcatggagattgatatgctgttctttaagaaacataactaaataacagagaactataaataaaaaggtcagtttgtgaactggtaaagaacatcataagggatttccttagttctaccaataaaaatgggaaaggataatcgaatgaatgaggaatttttagccagtaaagaatttttagattatatgagaaaagaatccagaaaagtaggagcagcaaatctcaaaagagtagcaaatacaggaaagagattttatcttggagaattgaatatttctaacggagtaatggcaatgggatataatctggattccacagaaattcaatctttgcttaaaacatatgagtcatgtgattggggtgagggatgggaagatgcaaaaataaatgaagcagctataagatctggacatggtgatgttataggaatttatagacttgatggtaaagaagtttggattcaaacggacttaaatgaagatccacaaacaacaattttcttaccagaagaacgataagaagagaataaataacagacaaataaagttttggcataaggaggaatgcattatgattgaagaatcagtaattaaaattgtagatgacattatgggaagtgggaaaagtacatgggcaattaatcacatcaatcagaatcctgacaaaaagtttttatgtatagtaccgcttttatcagaatgtgagagatttaaagagaaaacagatattgatattattgatccagaaaaatggggaagtaagtggaagaatttcagatggttagttgagaatgataaaaatattgtaacaactcattctctaataaaaatgatggatctggatatgttggaattattaaaaagcaagaactatgtactgatgattgatgaatgcctagatgttctggatacatataaaatcagcaaggatgacttaaaaattatattcaatgaaaaacttgtatcactggatgaagatggatttttagtttggaatgaagaaagaaaaccatataaaggtgtttatggtgacattaaacgactttgcagttttaaatcgttaatgggatttaaaaaagagaacagtgatgaattggcaaggattattatgtggaattttcctgttgactttttcaaatgttttgatgaaagttatatttttacatacttgtgggaaggaagtattcagaaatcttattttgatattcatggaattaagtacgaaaaatatatgttggattatgatagacaattgattccgcattgtaaagaaattgaatatgagaagagaaaaaatattgttgatttaattaatatatacgatggcaaatttaacaaaattgggatgaaaataggaaaatcaaatccattatcaaaatcatggtatgaagataagagaaaaaagaacagatccatattttcacagttgaagaacaatacagagaattattttagaacggttactaaaacaaaatccatagataatatgtatacagtttttaaaccttactgtaaatatgtgaaaggtgaaggatatacaaaaggatttgtttcttgtaatgcaaggggaaccaatgagtttaaaaataaaaagtctttagcgtatctaataaacttttttatgtcacctgatataaaacaattcgtagagcattaccatattgaatttgatgataatttattttctttatccgctttattacaatggatttggagaagtcaaataagagatggtaaatcaatagatctttatattcccagtgaaagaatgagagaattattaaaaatatggattaatgaatgcaagacaatgagtgaagcagcatgataaaaatgtggaaaatgagcttcttaaaatccacatttggcttctgaaatgccctatttacaagggtttcaggggtctttccgtaaagaaaaggataaggtaatactatattaatttaatcataatatcataaataatctgcttaaaaagtatatgttcagaatgtgtcatattttttatatttcgtagcgtagcggagaaatgtaaaaaattgcacattgtgatgctactaattctctgttcacaagcttgcttgtgggcagaaattaggagtctactgtcagagacataagatgcaaacagaaaggcgaacacatatgtatagaaaaacgatacagcatgagaaagagaatttatccaatggactaatcagtgaagaattaatatatgcctgtctgatgacatgtgaaaaggttatcagtaagaatgcatatttagagaagaaatggagcaaatggtatgaggatcttactggatcagcagatgctaatacttataagataaatcgacttgaatggatgggatatagaaagaaattacaatccctgctgctgactaaacattctatgagagaaatcatacaaaatactaagtctacaaaggtatatacggatactgcacctaagacaatggtaaagacagttattgatttaattgatactggtaaatatgtattgcttctttaatatatagtccccgacaggtagacggcaagttgacaagcaacttaccgaattattttccttgctgacgcaagaaaaatatcatagagagaaaagcagttgatatattaatttgattgtttaagggagaataatagattatggcaaagagaattaagaatccaaatgaaatctgttatatgtgcggtaaaagtaagtcacaagtattgcatttgcttgaaggcaactatggatatgtttgtgatgaatgtgtagagaatgctcatgatatgttatctgagagggcagaaagagaaagaaaattaagagaacatcaggaacatatagatgcaacaccttcacagattaaatcttatctggatcagtatgtgattggacaggatgatgcaaagaaagctttatctgttgctgtgtataatcactataagcgtatgcaccagaaaaagaaatcagatgttgagattgagaaatctaatattcttatgattggtaatacgggatgcggcaaaacttttcttattaaatgcttggcaaaatatcttggtgttccacttgccattgcagatgctacatctcttacagaagccggttatgtcggagatgatgttgaaaatattttattaaaactgtatgagaaatcagagggtaatttagagaaaacacaacagggtatcatttatattgatgagattgataagcttgcgcttcgtggtgagaatacttctcttacaaaggatgtttctggtgagggagttcagcaagcacttctgaagattctggaaggtacaattgcaagagttccgtttggtggtggacgtaaacatcctaatgctgaatgtgtaaatattgatacaacaaatattctgtttatctgtggtggtgcatttgatggattggagaagcttattaatcaagataagaaggtaaacagaactattggctttggtattagtacagagaatatatctaatgaagaagattttacacttgaaaatgtacaacagcatgatcttgtgagatatggcatgatgcctgagtttatcggacgtttaccagtaatcacaacacttgcaccattgacagagaatgatatggtaagaatccttactgaaccaaagaatgcaattgtgcgacagttccaggagctatttgctatggatgatgtcaaactacaatttgagaaagatgctttaatgaagattgctgctatagcaaatgagaagcgtattggtgcaagaggattaagaagcattgtggagaatgtattacaaaagattatgtttgagttgcctgatatgaagagtgcaaagaaagtagttgtaaatgctgagtgcgttgatggtgattctgaacctgttgtatacggtgcaagaaataagaagattgcgtgagagggattatttaaacttgtaccaagtacgggttcaaaaagaaggataagtgaaagatgaaaggaacgtggcatgagtaataacattaaaatgattaatggcggtcaacatcagaatataattgagaatagcagaagagctttaaaatatgctgatgtttggtcgaagtattacaacagagaactacaaaaaggattggcagaatgcatagataaaggtgatctctctcatgaacagacggttaagttagcttttatcggtactaagtatgtgatcagtttacttgatattgatagacagggcgaagaactatataaggttgatggcaaaagatatgagcagtcagaagaagtaagtcagaatttgcatgatactattgaccaattatataattttatcggtttcctgactattcgtgacctgttatctatatttcctataagaaaagattacgatggagaattataccagtgtaaggattatttttataccgtagatgtcttatctaagatggattgggacaagccaattggaagagataatgtattcagtcttatgtgggattattgcaatgaagatttagaacgcattttgatggaatatatgtgtcttatcagtgatttgcataagaagaaaactggtaaaggattcgcagaagtattttctgaaatgtatgatgttccatcttatagtatcaataaagatgcaggacttatacaggataatcagacaggtgaaattattaaaatagatagtaagaaacagagtcatattaagatagttaaatgatttctgctgctgaattggatatttattcacgatgaaatcggtatttctttgaagaatgaaaagatggaggatgaacttatgaaattatatgcagataccagatttgaagtaggacagacagtatatcgtgtgtatgagacacgaaagaacattgaacagaaagtaacttgtgatgtgtgccttggtacaggaaagattacatataagggttataaatgtaattgtccaaaatgtaacggcagaggggaacttgttactgatagcaaagaagtaacgcttagagaaattgatgtaccacgcaaagtaactgctattagattgattgcagacaaaaataaagatggattattaagatatacattagatgcaccacaaggatattgttctagtaaaggagcaattagaaaaagaattatttgctactatcgaagaagctcaggcatattgtgatgaagaagctgctaatgatgcgtgtaaagagtttgctatggaaatttgtaaaggatattgaataagaatacggaggaaaatcagatgaataataagaaagtagaatataattcaaaataccagacaggtaaagaagatggatttattattttagataaaaaggaagttcctgttgataagttatttaaaacatatgagaaagcattgaaatatatacaaaaacatggaaagataatggatattactgatagtacacctcttcctgttcttgtacatgagatttcaaaagatgaattttggagtaggcggcataacagatatactgttgctatgttctttgcatatcctggatctggagaaggatatggtgcaggaagcatgacacttatggatggtgaaggtgacaagcagaaatattatgaatatgaaattctatcagtagatgagccagagccagaggatgaattggcaaatagagagcgtgttgatcctgaatttggcatggaaagtggtagtttgtttgctgaaatgcgtaaagataaaacaggattctatgcagttaagtatgaagaagatatggaagatgggtggagtctattttctggtgacagtcgtccgtcattaatttttagaacaaaagaagaagctatgacatatgtgcgtagtggtaaatgtaactatgttcaaattgcagtacctacattttggattaaagaaatatcagaagaagaacatcagaaagaacgtaaatattgtgatgaatttgatgatgatttgacaatcagacataacaataagtggtatgaaggtgaatttatcacagagccttgggacgcatatatctttaacaatcatggagatataaaaataatgtcaaagaaatcgttattaagattaatggatgaatgtaatataaatattgaaatcagagaatgaagtggaggcggttgtcataagtaagaaatcagaagattgcacatttaaaatccggagtgtgcaagcgaatagggtttatcaggtgaataatggttataaatatgataagaatagcaagaaagaaattcaagagaaagatatacaggattgtagattaacatggagaaatgctgtcataaacgacagcatattttccagatatatgcttaaacatggggttagagtttctaaaaaagaaagtgttgatcttatttcaatgaagtttgaatactctgttccgcaatacagtgaaaaagaattatgctgtgatgaaaacgagaaaccagacgatgtacaaaatggagtatccacaaaaaatcttagaaaagattactataccaatggtgttaatattacatggcataaatatgataaaacaacagggatgccaattccagaagcagatgaaaatatctgttataaaatgcttatgcggagtcctggcaaagctaaaaaaggcgagtgcatttttataaaagataagttactggatacagcaagaaattatttgacaatgggattatatgaaaaaatgccagataagaatgctaaaattgtagagctatctgcatacagtacactgatcacagcaacagcattggattatattcatattccattaaaaaatatgctgattgtaaaggacttaaaggcagcagtcaacattcctgcattgcttgtgaagataaataatgataaacaatgtcttgtggaatcgcaagatgattacaaagtaacaaataccttatgggatggaatgggactaattgatgattctatcttcccagagggcatggaaggctttatctattgcagaagtcacttctttaaatcgtgcctgtttcggggcaatatccaacagtattttaaagattattacaaaactgaatacgagacagcaacagttacggatatgtttggaaatgtcatgaaagtatctgatgtaaaggtgatcgtaacggataactctatcaaatggctgaaatttaaggaactgatgggaaatacagatgccgaagcttataagtattacaaacgctttatgaaaaaagatggagagcaatttacgattgtaaagacggcacataagagcaagtatggtgatctccaacgtagttcataccagatgaataatagcttgccaacagtagacagaaaagtgttagagagtatagctaaaacaagcattgattattataataatatgattatagatgatgatgcttttattgagtatctaaaaattggtgcgtcaaaaaaatacagcatcaataatatgctgattgatctggataaaatcaattcccactttaggtatacaccattttttaaaaagaaaaagagtgatatgctgtcacaattcaagaacaaacgattaaaattaggaaaactcttgcagtatggggacaatctaacaatatgcggtaatcctgttgcacttttaaaatatattacaggtgaattaaagacaaatgatggatatgtagaggatgactgtttcagttgctttactcaaagggatgaagggattgaatgttataccacaagatttaatgatggtgaatgtctggcaggtttccgaagcccacacaacagccctaataatattgtacacttgattaataagcatcctgatatattacaaaaatattttcctaaactgggtaacaatgtaattgtgattaatgggatatatacagatgtacaagatcgtctcaacgggcaggatctggacacagacagcgtttttgttaccaatcagaaagatattattgatttagcgagaaaatcatatagtgaatatgcaacaattattaatgaaattccactactgggagccagtaaatatggtaaagatatgaagtcatattatgatatggattataaaattgctctgtcccagaatgatgtaggatatgcaagcaacttggctcagttggcattaagctattattatgacgatggctttaaagataatagattattgaatatatttgttatttgctctgttttggcacaagtggcaattgattctgcaaaacgcatttttgacgtagaagtcacatcagagttaagaagattaagtataatatgtaaggaaattattgagagtaaatggacagatgacaagcaaggtgtttattatcctcgattctatgcggaaatcatggaaatgaaagattctaaaaagaatattccagataaacagattggagagtttatctgtcctatggatattatatataaactcattgatgagaaagtaattgatacacgaaaacaaaagcaatatcagacagtaacagatgggatttcttatgttttccgatatgacaaaaatgaatttgcaggatttaagcgagacagtaagcaatattacaaaataacatcaattgttgaagaatattatagacgtgtgaaacggattagtacaaatgaaaaagattattctgagcaggtgttatttgaatttgaaggatgtatggcaaaattaaagaaactgaaaattaataaagctacaatgggagcattaatccaatacgcatttagtcagcattgtaatattagaactaagttattagtttctttgtatgaatataacaaaaacacattcttggaatgctttataaatgatcaaaatatacaaaaaactccacctaaaattgcgtaaaccattgattttacgggcttctgaatatctctctatgagggagaaagaaaagaccgtaagcctagtacttcttcccacacagccacagttgaatcccaaagcaattgtggctgtatcgctgatattatcgacattatgtcgttataatataactcccatatgtaaactacgttagaaatatatgccagatgcttatatctggtatatatttttaaaaaatattttactaaaaaatcatttaatctcggaggtgaaagaacattgacacaggacgacttaagaaaaatgtacagagaaagaactattagagaaaaacagacttatattgcaaaagtgacaagaatcaatggaagccttttatctcagtttgcacacgataaaattgatctctgtcctgcatgttttaaaagattacagaactatcttacacagtgatttcttacctataggagtgattgcatgatattatgtgaattaaatcagcacgactacacatatctgatccagttgttaaatgaaaagtattatcagacaactgacattcatgaacttaaacaaatcaattctatttataaacaattaaaattcaagtcagaatcctggcttaatcgtatcaagtaaaatcctggcatttctgccaatatttcaagaaagttgaggaaaacaaatgggtggtacatttacatcattaggcgcactcaaggcggctataaaaaaagaagttgaagaagcaatgcaagagacaatggagaaatcctataaagatgcaaaagataatgttgggaatttctatgctgcaccagaaggtgactatcataggacaggagcattgagagaatcaccaacaatgtctgtttctggtatgtctggtgagttatcattaaatacaggttacgggtattcaccggcaggaagagatacaaatactatttacaattatgcagaatctggtagcttacttggtaatggtggattctgggcgaagacagaagcagatgtacagaaaaatatagatgcatcgtttgggaaacggtttaaataaacagttacaatagcatattttgaattgtaatatatcgtactctgtcgtataatagtaaaaaagctattatgggatggaaaaacttatgggaaaatatattacaaagaaacaacaagttttaaatttattaaatgacatagaagctacaattacaagtcgaaatgcggatatagcaattcctattttaaagtggacacaagaaaaaattagattagatacagttgaaaaaaacagacacgaaaaatatcaatcaactaaatatagaaaatatcgtccaagagctgtaaaacaatgggaagtctatggatgtgcattggggaaaaatattggaagtgagcagaatggggttagtcgtccagtagtaattgttcaagacactagagaatcaatgcatagcccaactgttctggttgctccatttacttcggcttatgataaggacggaaataaaaagcggaaattagatacacaagtagaatttttaaatgataaaatgacaaaagcgtcatatattaaagtagaacatgcaagatgtatttctaaatctaggctaacagaaaaaatgtgtgatcttgatgagaatacaataagcgaaataaaggaaaaaataaaaatggtatataatttataagtgatttacaaattaacacttgacaaactaaatcatatattatattataatgataaaagttaagactgttgcagagagattttgattaaatctaagtttctctgttgtacattggggataatgattttgcacttcttattataagagtgaaactaaaatcattccaatggttataaactgcttgggaaacgtctaattcatattaggcgtttttcctttttaaatattaagtatataagggactatctcaacaagtagtctcttttctcatacaattttttaaagtaatatcataatataataatacataaggaggttttacatgtcagattttaaaataaaagtgacggcagatcttgatacgtcacaagtagaagcgaagctaatggctttgcaaaatagaaaaataacgatacaagccaatgccaatggtaatggtttgagcaatatgaataatagtttgcaacagatacagaacaatgcaaataatgtatctgcaagtctaaaaggcattgcaactacaaaattaaaagtagatgcattgaattttctaaagaatcaaactgaaaatgcagtacgttcagtgacagatcttaataaggctatgactctggttaatatgactatgagtaatatgtctggctcatctctatattctttgaaacaacaatcccttagtatggcaaaagatttaagtgccgctacaaaaacagtcacagatgcggttacaatttatgcaaatgagaacgaaagtgtaagttccatgctgaataaggcacaacctacagtattgttatcttctgcttctggcatgagttcttcatcttctgcggatgctattcaaggtattttgaatcagttcaatctgtcagaagatcaggcaatgcacgttgcggatacagttgaaaaactcagttcagagattgcattagatttctcaaaaggttgtgacacaatctctcagtcaattgcaacttctggttcagttgtaaatgaagcaggtatgagttttgaaaagtatgcggcattggtatcaacaacagcagaaaagaccagagtatctggttctcagattggtaatgcctttaagacaatcttctcaagaatatcccgtagtaaggatggacttactacagatgctgagatgtcagatgcagaggcagcacttaaaagtgttggtgtttctgttcgtggagcagatggtgatttacgagatataagtgatacacttgacgatcttaataaagtatggggaacattaaatcattctcagaaatcttatgttgcagaaatggcggctggggtaagacagaaaaatatttttgaagcagcaatggattcttataataaggctttacaattagaacaggatgcacttaattctgatggcacagccatgaagataaatgaaaaacgtgcagattccatcaatgtaagatggagaaactgtctgctacgatgacacaactttattctgacgcaatgccagaagaagcaattgaaggaatgattgattttgctacggcagttgcaaaggttgtagataattttggattattccaaggtgcattatcttcattaggtgttgttggtggtgcgaagataatcagtacgattgcttctaactggacaggattactttctgcaattacaagcccgttaggtattggaactattgcagtaggtggtgcagttgctgcaatatctgcatatcagaaatctgttagtgaaatggttgaatctgcgaaacaagcaggtgatgaatgggaaagcggtcaagagaatctgcaaggacaaattgataaaatatcagaactgagaactgctttagattctggcacattatctgagcaggaagccgcttccgctaaaagtgaattgttatctattcaggaatctttgagtgagtcttatggttcacaggttgcaggtattgaccttgtaaatggttctcttacagaacaaattgcattgttggataaagtatcagcaaaagaagcagaaaggttccagaatgagaacgaaaagggaattgataaagccacaaaagagatagaaaaagagagacatgagtatcttggtcagttctatgataatggcacccaagaatctgaagatatcaagaagtccattaaggatttacaggataagtatggggatgatgtattcacaactgaactggaagccgatggaattacaatggatcttcattttaatgcggatgcgagtacagcaagagaagctttaaatgattttaagacagatatttctgatattaaaaagcaatatggagaatcagatgtactgaatcttttaggtgataatgcatctgctgggttgtcaaaggcaaacaaagttctggatgagtatggtgatttatacaatcaggcacagaaagcaaaacttgtagcagatgatgatacatataaggctccatctggtaaggaacaaactgctgttaagtggcttaatgatgagacaaaagcagtagaagcatataatgatgcattgtcagaaggtaattctgatgcgattaaacaggcatctactgagtttgaagcagttgacagtgcagtacagtcattgttgaaaaattctggaatgtcagagtatgcagatcagtttacagaagtaaaagaccagttaaacgaatctgctatatctgcgaataaattcaatgaagctttatcaggaaatgattcatctaaatttggtaaacaagttaagaagagtgcggatgctctaaaagaacttggactgacagatacagattttaagtatgcttttgagacagacggtattcaagagggcgaggatcagattaattctcttgtagattctgcaattcaatgtggctatatttctgatacatccagtgagcaggtatctaaattggtaagtgttttatcttccttgggtgtgatttcttctacaacaggagaagcagtaggagatgcgacagaagaagtagcttcatctgtagatactatgtctgatgcattggattctgctaaagaaaaacagacaaatcttattgatgcattgggaaattcccgttctgccactggtcttacaaaagatgatatcaataatgtaacatccgcatttaaagaccttgataattttgatccggcttctatttttgaggaaactgctacaggtgttcatctgaatactcaggcattaaaagagtacaatgatgagttggaacagcagacaaagaataactttgcagaagctattaccaacaagcagcaagaattaaatgatgcgattgcacagaataaatctcaagatgtgattgatgggcttcaagaagaagtacagacattacagttattatctgctcagtatgacggtgcaacttcatcttataataaatttgtgactgctgcatcttctgctaatgaacgtgattcatttgaggatgtagcaaaaagttatgaaagtatcggacagttgattgaacagggatggacaacagatgattccgttacaaattatcttgacttattactgggtacagacagaatccaagattcccaacaggcatatgagcagttaggacagacaatcgaaggtacaggtcatagtcttaaagattatatgactttcgatgatgatggcaacttcacatctcaaggtgcatggtcttttgtagatgatgttgcaaataaacttggtgatgattttgttaaggttggtgaagatggcgaatacgcatttgatctgacaggtgataaaatcaatcaggttgcggatgcatttaatacaactacagattttgttgaattaatgggtaaagcacttgcggatgcaggggcaaatgtaagttttgattcttctgatgtgaagaattataacgaacagatgaagcagttacaggaaactgcaaatactactcaagagaaattaaaagaagtacagagtgctacaagcggtgaatctggcgaaggtttactatctggaattgatctcaactatgacaaagcttctatgtctattgaccaactggattctaagattgctgaactatctggcaagcgtgaggaaatcagtgtcagtgctgacacagaagaaggacaacaagcaatatctgcattagataatgagattgcttctctacaatctcaaaaaatcatggtgtctattggcacacagttagagggcggtgcgactgtcgatgaactgcttgctattacagatgatgcagaactggctgccaaattacaaattgatgtttcccaagtcgcagaagcaagacagcaattacaaactctgaaagatacagggaatattgaggtgcctgttactgttaagcttgacgaaggacaattcaatagcttgattgaaagtcttacgggtgaagcagtagaagttcctgctgaggtagaaacaccagaaataccagatatatcaggtaaaactgtagaatacccttctaaagttgatactcctgatgtgccagatgttcaaggtaaggaaattacctatacttcaacggtagatactcctgaccttccagatattcaaggtggcattgcatattatgagccacaagtagaaggttctgctgatggagaaactgccgaaggtactattaattatgataaaggcacagtagaatctgctgacggtgagacatccgaaggtatcattaattatgataaaggtgatgttgagaaagcagatggaacggtttctacaggtacaatcaattatgatttaggtacggttgctgttcctactggtatggtggcaagcggtacgatcaactatgctttaggtacagttgcgactcctggtaaagcaatgggaacatttggacaagccagagcatacgcaaaaggaagtcttacagatttccctgcttatggtgatggtcgtgtttcacttcctaatgaccaaaaagcattagtaaacgaagagtacatcaatggtcattctgaatccatagtgcgtgatggtgtatggtcacttattcctggtggcgcacatatggagaacttgaaaaagggtgacatcatattctctgcacaacagacagaagatttattgaaacgtggtgcaacacctggtcacgcaagagcctatgcacagggaagtttaagtgatttatcaccactctccaatgcttttggtagtggtttttctggcactggtaggaatccttgggctggcaagaatacaagttcatcatctggtggtggttcatcatcatctcaacaatcttataatgacaattctggtgcagtaagcaataatacatccgctacagaagataatactaaagcaacgaaagattctacagaagcatttgatggaatcaagagatacactcaaaagtttgcaaaagccgtagaacaaatttctaatcagattacagattatatctcttctgctttcaagacatctttattgaagagacaggtgaaagcaactgagaagcagattgcagcaaatgaaaaagcttctgatgcttatatgaaaaaagcagaggcaatcggactcagcgaagaatataagaacaaagtaattaatggcactcttacagtagaagaaattgacacatcttctgattctggtaagcagttagcaaaagatattaaaaactttgaaaattattatgatgcatccagagattgtaaagatacagttcaggagttaaacaacaaacttctggaattatatgaaacaatcgtaaatatgcctacagaaaaggcagagaaaaagattgacagattaaagactaaacttgaatctctcaattctgtttctgatgcaatttcattaggtggatctgcgattgcagcaatgcagaatcagattaaagtggataatcctggtcttggcaatgcacagaagaagcttgataaggcagaaactgctagaaatgcaactaagaaaactcgtgctagagcaagtaagactttaaaatctgctacggctgatgcagagtctacaggaaatacacttatcaaggaaagtgagaaacagacaaaatccataggcaagaaactgaaaaatgccgcaaagtctagtgcaaataaggctacttataatgcaattgcacaggcaattcgtgaaggtaaaacagttaatacaaagggactgaaaggttctgcactgaaatatgcgaaatcatataacagttctttaaaacaaggtaatactatttcttccaaggttaaggcaggtaaaactgttaagatttctggaatgtcaaatatattgaagtctacagcacaggtatataacgctgatgcaaaagagaaagcttctgcacagaaagtatatgacactgctaagaaagcagacgaaaaagctttggacaatctgactaaggctcagaagaataaagagaagttatatgcaggttctactaaggaacaacagattcttgcgacaacaaaaggtaagaaatcatatgtataccagaatatgcttcttacacaggaaactaagaatctcaaggaacagaataaacagcgtcagaaagctttaaaagagactcgtgatagctacatgaaagcaaaaagcaagtataatactgctgatgccgataaaacgaaatctcagaataaacttctgaacaataaaactgtcatgtctaagttgaataaaactcaacaaaaggcattaaaggcaggtaaaacagtaagcacaaaaggtatcactgatcctaaagtactgaaatggattcaagactataatgaaaaagtcaagaaatctgctgatttaagcaagaaacttcgcattgaacaggaagctttggataaagcaacaagcgaagcagcacaatctcaggcagaatacgcacagtctatcgtagaaaacgcaaagaagaaacttgagaatattgcaaactattatgattcctttacttctcaatgggaaaacagaaactctatgtatgaagcatacatggataggatgcagacacagggttacaatctgagtacgaaattttacgaagcagagattggacagcaacagaaaattgttgacaatttgtctcagaagtatatcgcaatgaaacgcaactttgcacaggcagtacaggatggtaagatcaaagaaggtacggaagaatactatgagatgcagaatgagattgaccaagttgcaattagtcttaaagaagcacaaaacaaagtggttgagtttcaagcatctatccgtgaccttaaatgggaacagtttgaccagttacaggatgcaatcggtcgtattaccagtgagtcagatttccttattgaccttatgagccataaggatatgtatgacaaagatggtaaaatgacagaacaaggtcttgctactatgggattacatggtgtcaactacaatacttatatggcgcaagcagataagtataaggaagaaatgctaaaaatcagtgctgaacttgcaaatgatcctaacaatcagaaactcattgaccgtaagaatgaactgattgatgcacagcaacaagccatcttatctgccgaggatgaaaaagattctatcaaggatttgattcaggacggtattgataaacagttggatgctctggatgatttgattgacaagtatttagaaacccttagaagtcaaaaggatttatacgattatcagaaaaagattggtgaacagtccgaaaagattgcttctctacagaaacagttatcttctctgcaaggtgataattccgaggaagccaaagcaaaacttcaaaaactcaaagaggatttaaagtctgcacaggatgacttggaagaaagccagtatgacaaatacatttctgaccaagagaaacttattgatgattttagagattcaatgaagaaagctctcgatgacagaatggataatgttgatgctttactttctgatgctatcgcaagtatcaatagtaattcatctaatatttctcagacattacagacagaatctaagaatgttggatatacattatctggtgagatgcagaccatctggacaagtcagagtcaggctctttctatgtatgatggcaagtttgataccagatttacaggcattacaactgctattggaaatgtctatgatcgacagaaagacatgattgatgctatggctgaaaaattagttgctaaagcagaccagatgttgcaaccacctactaaaacagaaggagttcttgaagaagtagaacaaaagccagataaagataacgttgcagaaggaaatccaacaccagaaccaccaaaagttagtgatgatgaatccattagagatgcggtgctggttgatcctgatgaaccaaagaaaaagccaaataaagacaagacaggtaacaacaaagccgaagtaggtgataaagttactttttcttctggtagatattatgaagcatctgatggttctggtgcgtctggtaatatgtatcttggcaaaaaagttaagattacacgaatcaataaaggttctaaatatccatatgctattgatgctacggatggtactgaacttggttgggtaaaacttaatcagttgaaaggctatgcttctggtatcatgagagttccgaatgaccagttagcttggacacaggaacaaggtgaagaagctattgtcagaaatgatggtagtattctgactccattaagtagagatgtgtctgtactaaatgcagatatgactaagaacttatgggacttcatgggtaatcctggttcattcttgagtgattatagtgatggatttgtaaacagtgaaaaatattctactaagaatgaagaatcaaatgtgaatattgcgagtgtatttgacaatgttacatttaatttaccaaatgtgatcgattcccaagcattcgttagagaacttgttaccaacaaaaaggcggaaagagccattcaagcaatgactattgatagaatcagaggtggaagctctttggctaaatataagtataaacattaatgtatgaggggcttgtataagtccctcttttgatagaggtgataaaacatgaatatagaagaatataaacaattaagtgaagaagaagaaaaacaattttataaggagttatccgaaaaattggaacgcaatgaagattttattaacgcagtacaaaagacatttgataaatatatatctaagaaatgtcttatagaattgaataaatggcaacaattaaatgaaaatatgaaaaatatgagagatgaatacgttttattgattaaagagattcgtgatattaaagaagaatgcaaaagaatttacggtggcagcgggcttcgatacaggattgctcgttggcttgcaagataaaattatatggaatgtaataaattgtaacaggttatagcttaataggttgtaacctgttttcttatatatggaaaggtgattcaatggaaaagcaaaatatcccttggtggatgaaactgaatttaacaatagaagaagcatcagagtattctggcattggagagtctacattgagagacagaattaacaatggattagatgattttgtgctgaatgttggtaaaaagaagcttatcaaacgaaagctatttgagcaatatcttgaaaagattactgtgatttaatatagaacaattttaaaataatattcttgaaaaagcataatgcgtatgataaggtaaacgcatagatgtaatgctctttcaagaaaaatgaaaggagcatatgtttaaatgagtaataaaagaaaagatagtaaaggcagagttctgaggaaaggggagagtgaaagaaaagacggtatttatatgtatcgttatacggatcttgatggttcaagaaaaacgatatatacatcaaatctgaatgatctaagagaacaggaaaaacttatccaacgagacattgatgatggtattggatataaggcaggaacaacaacttttaatgaatattttgagaaatatttagagttaaaaggaagcatatctccatctaccaagcgtaattataaacgtagttgggagaactatattaagaataccagattcgggaacatgacattaaaggatattactaagtcagatgttattcttctgttaaaatcaatgtctgaaaagggattaggaaaaccatctattaatacgattgttgcaggtgtattatctccatgtatgaaaatggcagttgaggataatataataagaagcaatccatgtattaattgtagaaaagaaattcgtggagaagatacagagccagaagatgtattgacagtggtgcagcaggacaattttcttacatacattaaaaatagcaagtatgcatattattatccattgtttgtatttatgcttgaaactgctctgagagttggagaggtttgtggtttgacatgggatgatgtagatttagaacatggctttgtaaatattactcatcagcttcaatatagcaatgcaggaaaagatgcttgccagtatcagatgcttactcctaaatctaaatctggtattcgtaatgttccgttatcaaatgcggcaagggatgcacttatggaacaaatgcagaatcagattgaaatggataagaaaacagagattgaagtagatggatataaagactttgtattttctaacaggcagagtaaaccatttattactcagaccattggtcgtattttgagtcgtattgaagatgattacaatgctgatattaaaaagtttggcgatactttaaagccattaccgcatattcatccacatctcctgagacatacagcttgctctcgtatggcagaagccgggattgatccaagaactttacaggatatcatgggtcatgcgtctatgagaatgacgatggaactgtacaatcatgttacagatgaacgtttaatgaatgaaattcagaagctaaatgatagacgtatttcataaaatagtattactacaccaatttcagatgaaaatcagagttactacaccaaaattaacatttttgtaataattcactacaccaatttgattctgaaacggtcaaaaagggctttactacaccaattttacaccaaacacataccaagatgtaagaagatataagaaaatacatagagttatgaaatagaatagaaatatctcatagtgataaatatctccaaaaatccagtaaaaacatataatttttataatttcaacaaaatttcacaaaaaaatgtaaataccacttgtgtttttgaataatatgcactataatataaaacatattaattaaagtttttagtctaaattaatattatatgtgtctaaggaggaaaacagcatggttgaactgattgtaggaaagaaaggcaagggcaaaacaaaagtactgttagataaagtaaatggtgcagtaaaagaggcaaatggaagtattgtctacttagacaagagcacaaaacatatgtatgaactcaacaataaagtacgtcttattgatgtatccggattccctattaagaatgcagatgaatttgtaggatttatctgtggtatcctttctcaggatcacgatcttgagcagatttatcttgacagtttccttaaagtagcaaaattggaagataaagacattacaggcactctgggacagttagatgagattggtaaacaatttaatgttacttttgtaattagcgtatctttagacaaagaagagattcctgaaatgctccacgataagatcagtgtagctttataaccatcttttattattaatactaaaaactacataacataaataaaaaggatacctgttaaaatattttcagcagatatcctttttattgcattttgcaatcatacctgttatcatggagaaacaataaatattaggagatgagagataatggaagaattatacagaataattgagcaaaaaattaaagatgcaggatatccaagagcaattttcggtgaaacggtttacggagatatctgcgaccaaattgagggaaaagagaatggttcttacgttttactttctaaatttgaagatgatgttattttcgaatatcatattactgtaatggatgatgaattcaatctcggtttactgataatgcgtactccggaaggcgtatttgaaactgattttgataaataaaacgttaaatcttgaaatatttgacaaaacctattctttagcaaatgttgctgtgcgctcttttgacggagaaattgaacagtgttatgactgcatggatcatttttaaatttcatggaacaattatcaagtcagatattgttccatgaataattcaggtttaatcttcgcgtaaacgtaccgctgtagccgctttgcggcgtcttgcatcatccatggctgcataatgtttctttgtggtgtttacatctctgtgacctaatacatcggctacaaggtaaatatcacctgtttcctgatacaaagtagtaccgtaagtactgcgaagcttatgtggtgtgatttttttggtggtcgtgatggcacatgcatatttttttaccagattttcaacagcctgaataccaattctttttcgctgggtagagtagaagagagcgtgttcatgaccagatacaggaacaatattcttacgaacttccaagtactttttcagagctttttctacctcatttccaaagtatacaaccatttcatttccaccttttcgggtgactttaattccattatttttgaaatcaacatcttcaatgtcaagtcccacacattcagatacacgtattcctgtgccgagcaggagagtaacaatagcaagatcgcgttcttttgttttttcgtaataaacacgtttctgaccggtaagctcatcgccacaatgttctatataatccaataacatggcaacttcatcagcatcaagacgtataatatttttttcatgagttttcggaacatctacaagaacagttgggttcgtctggataaattcatgtttataataatatgcataaaaacttctcaatgcagaaatttttcttttcaggccacgttcaccattggtttctgttttatcaccatttttatatactttaagatattcctgatattcctcgatatctatagctttaagctgatccagaacatcaacggtaaaatctttcatggaatagtccttaaaggcaggattttcatccaggagaaactgaaaaaagattcggatatcatacgcataggaaattcgtgttttggtagtagtaagcggatccatagcacgaaaataatccttgcagaaatcaggcagtgttttcaaaacagctcgaagcttcaaaatatttgaaatatcggtctgttcgtgataagtgactttcttgctatcattataataatcaatatatttatccataaaaaatctccttaaaaaaattattttataacttcttaatgttaagaatattgttgagaatatttaagacatataaatcatcaaagttgataatgattaataattgcagagaaaatgcctttgtcaataaacgattacagcgcaaagacagctgcagcctacatctatatgaaaaactcgcgtttgtcgtatagatgtagataacataaaaacatactactttcgtatgtttttatgttatcttattgttgccaaccagtacatccatttattgtttccggatttatttttgcgtgctaattgtttgtatttatcaaataataacttttttctgccttcatatcaaaaacattgattgaattacttagcgttcaatttaaatttttttctacagcaattttttatcaataatctggtagtttgcccgatgtatatacaaggcttttccgtcaaccataagtttcgtcatttttggaaggtcccagtacacgtcatctcccgaaaaagccgctataggctgtcccaaccgggatttgatcactactatgcgtgattttccaaagtcattagttttacagacaatctgtaataatgcgattcaattccggaagctcttttttgagagcgatcagtttcccctcttttagaaaacaatgtctggaataagcggttgtgcagatttcatttctgctcgcattaaaaaattcataattaaattccagagaaattccattatactgcttaatgccaacgcggatccggatttcatcatcgaagaaaacctgctttctatatgcaactgaaatttccacaacaggggagatcactcccaactcttctactttcttatagctgaaacccatccggctcatatatccaatcctagcctcttccatccattttacataattagagtgatggataatgcccatctggtctgtttcatgatattgcgcttttctgtaataagtgtatgttttttctgattcttccttcatataccatatatccttttttatatatttataaaatgaaaataactataccactcgcttgtctgcgaaacgatgtactagagcgtgcagattgcgggaatgatttttcagacacgctctagctgaaaccggttaattatgacggtctcttcacataattcagaggattctgatttaccccattaaccataaccccaaaatgaagatgaggaccggtgctgttcccggtgcttcctacatatccgatgatatcaccttttttgaccttatctcctacactcagatttgggttaaatttagactggtgcatatattctgtgataagtccctttccatcatgattgatcttggtataatatccggcaccgcctgacgctgccggtgaaagcatggcaacaatggttcctgatgctgccgcataaatcggtgttcctgtaggagcaggaatgtcaattcctttatgattggtagaaccgactcctcccggagattccctgtttccaaaataactgctgatataggaataaccggagcttaaaggccaccggaaagaaactccgttctgatagtcaggaataagagaaccatcttctccaacataatggttatcatcaatccactgatttgtaaccagagcacctgtggaggaattcaggtaatacttctctccatctacagtaacccacccactttcacgttcgcatgtagaaggattcatataatatttctttccgtctactgtcagccatccagaggccagcaccccatccgatttcgcataataatgagcactgtttttcgtgatccacttactgatggaaagttttccgtcagactcaaaataatatcttttcccagatgacgatttcaggataatatcatcgtaacggattccattagttttcttaaaataatacttgtgtccgttgatcgtctgccatcccgtaaccagtttacaatctgatttcctgaaataccgataataggaatccggtttatagaagcctttgacaagtttaccatttgaagctgcataataataagaaccgtctgtttctttataccatccgcttctgaccagctgaccggtatttctgttaaaggaataccagcttccctttactttcagacgcccttttgccatagtaccattggcctgaagataataggtggaattcccgcttttgcgaaaacagtttttatacatttttcctttttcattaaagcagtaatatacattatttactttatggaaaccggatcgtatcaccccgtcattccagaaatagtatttattccctgcagctgtagtaacccatccggtatgcatatacccttttttttcatcaaagaaatacgtttttccatttactgtctgccaggtagtaagcattttacctttttcattaaaacagtacttttttccactgatggtcagaattccggctttggctgcaccggtctttccgaaatagtactgatttcctgcagcacttttgtaccagccggtagctttttttccgttcttatcataatagtaccagcttccgttttttttcacaaatcctgtctgctttttggaagttgctgcagcctgaaccggtacagagaaaccggaaaagattcccccctgcagagccagtgccagaaccaaaagaaaagctgtcaaatataacttttttttcttcatagtaactcctgtgtgtgtttttttttgtaactgtgaaggtttacttatttttctctcgtttattctttaattcaacatatctgttcttcaggaaaatccctgcttttttgatatatccccatattatgtttaaaatccgcaggagatatttccatatggttatgaccagtccggaaagcggattccatattttcataaagaaattattttttctcgcttccagttcttccggtgaaaccttgtgtttttcttccttgcaaagaggaagtacttcacctgtctgttcatccagacagtcaatatttatatatgtctcctcttctgccggcatttttttgtcattaagagaatgattgatcagtctccagatcagagcataaagtacagcaaatacaggaactcctgcgatcattcccggaaccccaaagagaccgcccccgatcatgatggcaacaataaccataaaactggaaagtccggtagagtctccgagaattttcggaccaaggatatttccatcaaactgctgaagaagcaggataaaaattgcaaaatacagaccttttatgggatctactactaaaataagcaaaatacatggaatggctccgatgtaaggaccaaaaaacggaatgacatttgtcacaccgataattacactgataagaattggatacggcaaatccaaaagcaacattccaaaataacacaaaattccaataatagcagaatccagaagttttccgtatatgaaaccaccaaaagtcttgtctgtaaaacgcataacgcgtataagcatatttgcccatttatgaggcaatatagcatataccatcattttgcttttggcaacaaatttctctttgtctgcaagtacatacaaagctacaatggcaccgatcagaaaattcttcataaagatcaggatatcaaaaatacctgctgaaacatttttgagcatatcctgcatctgcggaagaatatcggtagtaagatactcctgtgcttttacagaatactggttgatcatatcgagcatttcaggattcagtttccatccatgctcaacaaatgaattgagccacttttcaataacttttatatagtacggaaaactgtaaataatactcatgatacttcggatcaactgaggaagcaccatcatcagtaatgcgtaaatgataatccagaacaggaacatggaaaaaaggacacatccccatcgaatagcccgttttccttttttctgtaacttaatattatgcttttccagctgcggatagatcagcttctgctcaaagagattgatcagcggactgagaatataagcaaggattacaccatagataataggcgccataattcccagaaaagttttgattcccacgatcagggttttcatgtgaaatatgccataataaaacagcatactggcggcaattaccagaaaagcggttacaccccagtgtaaatatcggttgtcccaacgaaatttcataatgtcctcctttttaacatggtatgattatagcatatattttaacaaatgtcatgaaaatttaatatatattaaaaaaaattatagcagtcttgttactgttcatacaccactatcccgaggcatacaagccaaaattccattgccgcaggcaatctggaatgaattgaaaagactgttataaattcatccaaaaacagatactttaccaaggatgtggtaaagtatctgtaaaaatataatcctatttattttttatggaatcaaaaatctcaattgcctgaatgattgcttttgctgcaccatcaattccaagtttgctgctgtctacgcagagattgtagcttgaagcagcaccccatttcttattggtgtagtaattatagtaactggaacggctcttgtctgtcttattgatcatgtcttttgcttcttttgcagttttattatgtttctgtgaaagacggttaatcctccagtctgtatctgcatgtacaaatacactgaaacagtctttatactctgacaacgcataatctgcacatcttccgaccataacgcatggaccttcggaggccagtttcttgattgcgtcaaactgtgcaagaaatactttgtggttcataggcatatctgtaaatcctgaagaagaataaccaaatgagtaagtatccataaccagagaatataaaaagctgttagttggtctttcatcatgattctcaaaaagttctttgcagataccgctttcatttgctgcgtgttcgagaagttctttatcataacatttaataccaaaatatttggcaacttcctgacctatctgtcttcctccactgccgtactcacgaccaattgtaataattgaactcgtactattcatagtctgcactcccttctgttacatattcgatagacatattatacagtatttccaaaaaaatgcaaactactttcgtaatttttctaataatttaacgaaatattcaggtaaaggagctataaactccatatattcgcccgttgatggatgaacaaagccaagaatcattgcatgaagcgtctgtccctgcagatgataaggattcttaccggaaccgtacacttcatcacccagaagtggatgaccgatacttgtcatatgcacacgaatctgatgcgttctgcctgtttccagacggcattccacataagtggcatttttgaaacgttccaaaactttataatgtgtgacagcatccttgccgtttttatagttgacagccatctttttgcggtcaatcggatggcgcccgatgggaccttcgatcgtcccttcgtcttctttcagtactcctgctacgattgcccggtatctgcgcctgatagaatgctcttttaactgttctgccaggttgcggtgtgcattatcattcttgcatacaagaagtgcacctgtggtatccttatcgattctgtggacaataccaggacgcagaacaccattgatccccgacagattgtccttacagtgaaacataatagcatttaccaatgttccggaagtatgtccggcactgggatgaaccaccatcccctttggtttatttacaataagtacatcatcatcttcataaagaatatccagagggatatcttccggaagtatatccggctcttttatgtcaggaactgctacggagatttcatctccttcctgaactttgtagttggcttttacagcagaaccattgacggttattttctgctctttaagcagcttttgaatataagaacgtgacagttcttcgttcatttcagaaagatagcggtcaatccggataccggactgaccttcagaaacctgataattaagaatttccataatactaatccttttttattcttaagaagtcataatcttcatcatttttgtatctgaaacacaccagcataacaagtaatatgccactgcataccacatacatatcagctatattaaataccggaaaatcaatcagtgaaaaatagataaaatccacaacatagcctctgcatactctgtcaataaaatttccaagagcaccggaaaccattaccagtgcagttactgacagcggcagataatatctgtttttcgggattctggcatatacatagataaatacaccaaaaaacaaaaggcacaaaatcacaaacaccggaattttaccttcaaacaatccaaaggccattccacgattttcgagataccgtaattgaagaactcccggaatgagagagatatcaggctgatctttcagttgtgccagaacaagagatttacttccctgatccaggattgtcagcaaaaggataataatacagcctctaatccagtgcatacatgaagatacggaggaaacagctgtcatatcagaatctcccggattgcctggagcagttcctcatctgtgacagttttgtctataaaacttttaccaatcccgtccataaggataaatttaatatgaccggcttccatttttttgtctttttttgttgctgccaggacatccccggcattcagtgaatcaacagaaagaggaagattataagaatggcacccttttctgatctcttcgtattcttcttctgttaataatcctctctgcatggaaagataagcggcagcgatcagaccgactccaacacactgtccatgaagcagctgaaagtttttcattttttcgactgcatgtccgactgtgtgaccaagatttaaaagtgcacgttctccctgctccttcggatcacgctctaccacacctgccttgatctcacagcatctgcggatcattctggaaagcatactcagatccaatttactgatctcaggctgattcttacatacaaaacggaagaactcttcatcgcagatcagtcctgtcttaagaatttcacccattccacaggtgaattcccgattcggaagagactgcagggtactcatattcatatatacaaggcggggctgatggaaagctcctaccatgtttttgtactgaaggaagtcaacacctgttttacctcctacgctgctgtcaacctgtgccagaagcgtagtaggaacctggataaaatcaatccctctcaggtaagtggaagctccgaaacctgtcagatcacctacaacaccgccgcccagcgcaaccagcagaccttttctgtccatttcattctcaatcaaagttttatataattcctgtactgtattcaggtttttgttcttttcaccagcttcaaatacaaaagagaatatttcagaggaaatttcctgaagagctgatttaactgcctcatgataaagaggtgcaacatgactgtctgtcacaatacagattttccggttttcaagtccttcttctctgattgcaccggcaagatcctgaaagtcatttttaaaataaataggataatggaaatctccttcccgttttacaagtaatttctgttctgccattttcctgttctccttttattacaaaatttatacatagcgcataatacgcacactgcagcgtcctttttttgtctggtgagaaacaccgtcaaaaatgaaccgtcctttcccacgtacagatataatgtcaccatctttcggctcatatccgttgctggtgatcagttttccgttgacaaaaacctgcccgccttcaatataagataccatactgcttctggatgtcttaaaagcaagcgagatcaatgaatccagacgtaccgaagcgcaggtaccgctaacagattcaaggacagggcgtggaaattcatcagaatcctccacttttgtgatcagaatattggtatgacggacccggcacagattttcaagaaagaattccgtcattttgttctggcagaaaaaccaggcagcttttttctgaacaacaatatcaccgatcacacttctgtctactccaagattgagaagtgcaccgagataatcacgatgagaaagctcttcagagaatttaagagcctttggttcaatcctcagacagtcgatgggatattcccatgtaaaagcaagagcatcaggatgaaatgcaaccatctgacgctccgcattctcatagcctccggacgtctccataacaatctggggaaactgatgtttcaggctactgactatattctgttcatttaaattaagaaaatccgaaaatgtaacgatatctctctgccaggagagatttgccaattcccggattctcttaagaaaaaattcgtctttttccatcctggatcaatatcctgctcttacagacggagcagagcctcccagaatattctgaaggtcaccggtaatatctacattgtacggtccaagtacaaagatatagctggatactttctgaaggctgccgcctaaagaatagcatgcaccggacgtgaaatcgatgattctctgtgccagttccacatcaattccctccagattcaaaataacagtagaattatctactaaagtgtcagcaatctcacgcgtatcttccatagaagaaggtttgatcacacagacttccatatttgggccctgatttgatttgcggctgcttctcattggagtaatcttggaagatgctgcaggacgtgtctggcgttcggcgcgttcctgtttaaccgtaaccttagacggagccgaagcggtctgttttggagcagatgcctgtttaggagctgtctttactgctttctcttctacatcatcaaagtcatcattatcgtcggattcttttttcttagagaatttatcaaaaaatttcttctttggtttctcatcgaaatcgtcatcgagaaagtcatcatcttcttcctcatctaacagatcatcatctaagaatccatcatcatcgtaatcatcgtttaatttgatggcatctaaaaatttatctaaaacgcccattttaatctccaatcttattttaatcttcttttattgagtaatctctttcgccaaagatacccgttcccacgcgcaccatagtggccccttcctcaactgcgacctgataatcatttgtcattcccatactcaggacgctcatattaacattattaatgtttttggccgcaatgtcaacacttaatttctttaatttttgaaaaacttctctgttttcttcaggatttgctacaaatggtgcaattgtcataagtccttttacctgaagatgctcataagaagaaatttcttccagaaatggtaatacctcttcgactgaaaggccaaacttactttcctctcctgctacatttacttcgatcagaaccggcatgcagatatctttttttgctgcctctttttcgatggcctctgccaggcggacagaatctacagagtgtaccatagatactttatcaataatatatttcactttatttctctgtaaatgtccgatcatgtgccactgtacatctgatggcatctgatcgtatttatctacgatctcctgaaccttattctccccaaacactcttgcacccgcatcatatgcttctttcagcatttccaccggtttggtcttactgaccgcaataagagttacctctttgggagaacgccctgcagtatcgcaggcctcttcaatattcttttttacaaggtttagtttatcagctaacatattaagcctccttaattagtataaaatgtcttcttcctttactttatcagcgtttcgaacaatgtgatcatatctggaaagaccgtaggtggtgtttttagatacaatagcatattcttcgttctcatcaagtatttcaatacggcgaaaaaccgcatagcctttattaatacagtatactccctccagggtatctgtctctccgatcacgtatttttcaccggtatccgtattgatcagggcatccccttccttaaatgaactcttgtcaacataataaatctgaggttgttctgcttcgtccactgccagtttggagacagatgaatcatcaatgcttgcgtaaatgctcacatttttaaatgttgttttatttttcccctcataaagggtaaaacctgtctgattatcctgtgtagtggccattctggatggaatcacataaaaatccttggttacaatagaggtaagagggattttcagacctacaactgtgttggttacaagttcaatgtccaaaaaacggtcagatgcataacgaatcagacctttattgaaatcaatctgtccatatttgtcaccgtctatggtaataatggaaaaatctccgttttgtgtcatatcgtcttttaaaaatttgacacgtattgtagaacggtctttcagtttttcaacctgtctgtcgctcaagggaatcagaaggctccagcgttcatctgtgataatggtataaatgtcatctcctgcttttaccttgtcggaagttttcaaatctgtttcatggtaagaattctgatcgaaatcttctgcctttacagcatctactgtttttccttcataattatccatggaatataaaacgataccatcagattgggactggcagatagtttgatttccgggataaatatctgctgttttgtcattgtcaccactgtcatttccttcaccgtcctcatctgaagtaagaggagcagatgaggtattgccagactctgcatattgaaggatatttcccttcagttcatatttaaagctgtaggtgctgttaaatttacttgaactgaatcctttggaaaaactcatcatatcagtccgtacctttgaaagttcttccggggcaagagatgccggagcagaagctgtttttgtatcactaagtccgtacaccgctccggaagcattgattttactgccctcccttgcataataagtaatatagcctgatgaatctgccttgcataaactttcttcacgtatggcaaggccggtatatgtttcgttgcgggataaaggtcctgatgtaacctgataggactcaatatgagtagttgtaaaatataatatggcactgaatgccatatatatgaataagatgccaaacatgatcgttccgatattcagccccacgaccatgcgaagccttgccaggattcccggcattttttttgatttattatcagacaatggaatgtctcctttttgtgcagttcataatcattctataactgttcagcgatttcacagtgactgctgaatagttacactattttccaaaatattgtaacactttgcacatttaaaaacaagtttattcataaagaattcacaataatcgttactgttcacacaccactatcccgttactgagaatggagtaaacagtaacgggagcacataagtaagaacacattttcagaatataagtttgctttttgtcaggaattatgatatgataaaaaaatcagaaactgttcagtatctcatagaatagcagactgctgaatggttatgaagagtgtacgaacaaaaaataacttaaaaaggagggtataattatgccatatggaagaatcacgccaaagcagcaggagattcttgattacataaagaatgagattttgaaccggggatttccgccggcagttcgtgaaatctgcgaggcagtcaacctgaaatctacttcttccgttcattcacatctggaagcactggagaaaaatggatatatccgcagagatgcaacgaaaccacgtgcgattgagattattgatgacaattttaatctggtccgcagagaggttgtgaatgttcccatcataggaactgtggcagccggacagccacttctggcagttgagaatattgaaggctatttccctatccctgcagagtttatgcctaattcacagagctttctgttgaaagtaaaaggggaaagtatgataaacgccggaatttttgacggagatcaggttctggtaaaacagcagtccacagcagaggatggagatattgttgttgcgctgatcgatgacggtgctacagttaagactttccataaagaaaaaggatactatcgtctccagccggaaaatgatacaatggagccaatccttgtacatgaaggtcttcagattcttggcaaagtatttggtgtgttccgtttgtatgagtaatataactgatacgtgaatagtcaggcagatattcgcaatccgcttcgcaacttgctcataatcgaatcaagcaagtccccatacactgcaaattatactatatcaattcaaaaaaacaacagaggaaatcaggtatctcttaatgatgatatctgatttcctctgtattttattttgcagatttcacaaattcaggcggataaaatcatccgcctcgctacgcagttctacaccgaataactgtaaatttttcgttactgttcactggtaatatcccgcgaggtgttttttgtgaacgaaggtcacagaaaacccgagacataccgcgcgactttatgcgattagcataaagtctgtgcatcgcaagcatgttgctgtgaacagagtgaacagtaacaattttttctacttatttctcaagaaattcattaacgtcaagaaccttaccatctctccagattctttcgaggtcatagaaaagacgattctcttcgtcaaatacgtgaacgatcatatcgccgtaatccataagaacccagctggagtttctggttccctcaatctgttttgcttcaaatccggctctgccaagtgtttcatctacattgtcaaccatagcctgaacctgattctggttggaagcacttgcaattacaaaataatcggcaattacagatacttcatggatatctattaccttaatatcttttccttttttctcatcaagtgcgcggcaggcaagttttgccatttcaagttctctgttcatggaaacaacctctctttctatctgcttttgtaactgttcaatatcttcatgatcaacagactattgaatagctacatatatcttctctaaataaatatttatatccgtaatctgttctccctgttgtgctgtcccctatatgtaaaactctgccagtcgagacaatttatactcaggactgtcttttcatgtgtaaatccctgtaatacaagaaagcatctttcgtagcattatcaatatctttcggattttcctccagataagccagtgtatcacccaaaatcttatacatacattcgtcaagatcctgaaaagccagtttacgtacaattgcaagattaggagctttatcacgttttggttcaatataatcggcaatatagacgattttttccaacagtgtcatctccggctttccggtagtatgccaggtgatggcagaaagaatattttcatctgtaacatcatacttagccttagctacgtaagctccaagcttggcatgaagtaaaaaaggatgctcctgttcgaattcagataccgaaatatgatgctggctgcacattttcagcttctttttgttcggaatacattttgcacagtcatggagcagtccggcagtctgggctgtgatcagatcacagtcatgaaccatggcaagtgctgcacatgtaaacataactcccaacgtatgttcataacgatcctcatccagatattttgctaattttttctgcatttttataaaatcatactctgccatcggaagatcatcctttcttttcggccagactgtaaatctggttttctctgatatactcaatcaccggatcaggaatatagtaacgcacacttttatcttctctgatccagtttctgagcatttcgctggatacatcaaggtttgtggtattcagtgtcagaaatgtgccattatatttaagcgaaagacggttcatttctgcttcgagctctgcgattgtggaatgatttcttacagcagttaccagaatgcagtttctgcagattctttccggttcacgccatgtatcaaagtcatacagggagtctgcgccgattataaaataataatcagtatccggattcttctcttttagcatttccagtgtatgataagtgtaagtataaccattttcatgcatttcagtcagcgacagttcaaagtgaggatttccggtaatcgccctgcggaccatttcaactctttcttcatctgtggcacgtccctgacggtttctcttgtgaggcggatttccggaaggcatgaacagtaccttttccagtcggaactgttcgtatgctttctctcccagaatcagatgccccatgtggatgggatcaaaagtaccgcccataataccaattctgtgtttgatgtcagccataaaaaactccgtattattttctgggtaattcaatttttttcttttcgtttttgccttcacggtataaaacaattttcttgccgataacctgtacgatctgggaacgtgtacgttctgccagaacctcagccatctggcgcggatcctccaggcagttctgaagaacactgatcttgatcagttctctggctgcaagcgcctcatctactgcggctgtgttctcaggagtaagaccaccctttccaagctgaaggattggatccatggtcattgcaagaccttttaaataagctctctgtttacttgtcatttttattttcctctgttattctctgcaaacggacaaaatcatccgtcttaccacatctgtttcattattgaatctatttatagtaatcaaaatcaaatccgtacatacgcacagtatcaccttcctgaatgcctgccttctcaagttcttccaggatgcctccctctttcaggaatttctggaagaatgcgaaacctttttcggaatcaagatttgtgtagccaagcatcttttcaatcttcggtccctcgacaacaaaaattgtcggattttcaggactctgctctactgtatatggaaggttttctccgatcaacatatcttcagggaagaattcctgttcaaatactacaggttcctgtgggcagctgtcaagaagttctttcacatggaataaaagttctctgacaccctgaccgctgacagcggaaatcggatatacctggattccttttggctcaaattctgccttaagtttgtcaatcggactctcttcgccgtcttctgtatagatacagtcgattttatttgctgcgattacctgtggtcttgcagcaatttccggattataagcttccagttctttattaatcttgtaaatatcatcgattgggtcacgtccctctgtagatgctgcatctacaatgtggataatgactctggtacgttcaatgtggcggaggaactcatgtccaagtcccacaccttcggaagcaccttcgatcagaccgggaatatcagcgatcacaaaaccaccgttttcagtatctacaacgccaagatttgggctcagggttgtaaagtgatagttggcaattttcggctgtgcgttggtaacacgggaaaggaatgtggactttccgacattcgggaatccaaccagacctacgtctgcgattactttcagctccagaagaacttccagttcctgcgcaggctgtcctggctgtgcatatttcggaacctgcatggttgcagtcgcataatgctggtttcctttgccacctcttccgcctcttaatacgatctggcgtttattttcaccggacatatcagcaattactttaccggattctgcatccatgataacagttccttccggaacttttaatacaacatcttttccatcggcaccatggcagcgttttttgccgccttcctgtccgtcttctgctttatattttcttctgtgtcggtagtcgccaagggtgttctggccttcatctacctcaaatatcacgtctcctccacgaccgccgtcgccgccgtcaggaccgccattcggaacatataattctctgcggaaacttacatggccgtcgccgcctttaccggagcggatatagattttcgctctgtctgcaaacatatgacacacctctgtcctttactaataatttcgtaatagtaatcttcttaaattaatgcatttgagaccgttcagcaggatttcgcactctgatgagtcggatcaatatgcattatttacaaggattgctatggtttcttttatatcatataactcttttaatctatagcaattctactataaaagaaaggctccaaacccatattagatttgaagccttcgcttaaccagattattctgcttctactggaacgatagaaacctgtttcttatcgcgtccttttctggtaaatcttacgacaccatctttaagtgcgaataaagtataatctttaccgcaacctacgttctcaccagcatggatcttagttccgcgctgtctgtaaagaatatttccagctttaacaaactgtccgtctgctctcttcgcacctaatctcttggattcggaatcacgaccgttctttgtagaaccaactccttttttatgtgcgaataactgaaggttcattttcatcatgttgttacacctccttgacttttactgtcaaatatcgattgttataactatgttcaatttctgttaatccgagaatcagcgaatccatgagaagggttcccctctcagtaaccggagccgtaaaatgaaaagatacatagccgtcatcttcctgcacttcaaactgatcatctgtaaatgtctcaagagaatttacagtattgatcaccagtacagaaacagcagcacagacaatatcctgtccttcctctgcatatccggcgtgacctttcgaaacaaattccagataatttccatttctcttcttaactgtaattgtaatcataatgacaccagattaaccgttaatcttttcgattttcactttagtgtactgctgtctgtgaccgtttttcttgtgatatccagtttttctcttgtatttgtaaacgataactttttttgctttaccgttctcaactacagtagcggtaacactggcatctttcacatcttcaccagcttttaatccgtcattgcttactgcaataacattatcaaaagtaacagtttcaccagcttcaacaccgagtttctcaactctgattacgtcgccttcagcaactttgtactgtttaccacctgttgcaataattgcgtacatctgtggcacctcctataatctttactcgccagatatggtgacctttcggtgcttgtacctctctgtgcggcatctcatttataatagcggacaaaattcgatttgtcaataagtttttttcaatttctttgaatttttttcttttattttacaggtacaatttcaatccggtatccgtcaggatctgtgataaaatacaaactgcagagcagttattcagttacggaaaaatatcgatgagaattgcagatgcttgtttggtttacataattattttatggtaaactataattctctgatttcctcaatcacaggttttcgcactttctttctggtaagttccaggatatgcagtggagtgatgtccactgcttttgcctttaccggatctttgcgcagatatttctgcaggacatggaacagttcgtcctgatgatcctgattttccatattaataaaatcaatcagaataattccggacaggtttctgagacgtaactgtctggcaatttcctttgctgcctccaaattgatttttcggtaagtttcctgcattttctttttgcctgtaaactttccgctgtttacatcaatggatacgaaggcttctgtctgctggattaccagaaatccaccactgttcagccagactttctcatgctggatttcttctaagacagtttccaggcgataaagtttgtaaagagggagaagtttatcatcataaaaccgcagcttctctttttcctccgggctgttactgttaagatagtcagaaatctgtcgggatatctcagggatatctgttatgatctcttccaggttccggctgttggcgtcgcggactgcagagatataaaaaggctctgttctatatacgcagctgaaacaggtacgggatcttccgtctacagcagccttatgatacaggcccttcaggtattccagttctttcagtatttcttcttttgatgcatctgctgcatttgtacgaacgatgataccaaactctttatccgaacggttaacttctgcttccatccacttactgatacggcttctgtcatcattggaaagtttggaagacagaccaaatttcttatcgccggttgtaagaaccagatatttgcctgtaaaattcagattcgtggttacagccggtagttttcccttcattgcttcccggctgatctgcacaaggatttcatctcctgcctttaatgggcggtcacctttttttacagaagcataaatcgcatttggagcatcggaaagctgcaggtagcatttttccccggcagaaatctgtacgaatgcagcaccgatattggcagctatattctctatctgtccaacataaatatttccaagagaagatttctccccaacaggttcgaagcgcagttccattactttaccgtcttcttcatacgcacatacatagcatggaatctgccggatattcatttgggtaataatcagtttactcaacttcttcacccagtgcttccagagttacaaatttatgttcttcctctgttcctttatctgcgtatacttccagacgtttgatggaataagcaaattccggaagttctatgccaagccatgagaagaatgtatctgttaccagttccggttttgtgtaattggcacttgcggaagcaagcatcataaagatcttgtctccctgaagttccatcttatagataaacgggcgaatatcaatttccttttcgcttcgtttggtctttttcattactttgatctccggctgcgccaggaaatcactgattttatctttccaggaaatttcaggctcttttcccggacgaaattctacataataatcggctgctgccaccagtgacattgccttacccgcctttccgtcctcaacctgacgggtactgagtacatgtaccccttctaccatcactgcatccagacgtcttgtgatctctgaagtaggaactgtctctgccagctccagatcgaagtactctcccagactttccgtaccaactcctaatggtgcggcaaaagacatgatcatatgcggactgtatccaccggaaaaagcaaccggaagattggctctgcggatagccttctggaaataacgcatggtatccagatgtcccacaaatttcacaggaccctctttgctgaatttaattcttaccttcataacatacacctccgccataacgcatagcaccacagccggaacatttctgacggcagtttggtgttacggtttctttctttgcctgttcccattcgtggatcaggaacttcttggtcactcctgcatcaatgaaatcccatggaaggatctcatctgtggaacgttctctgagagtatagaaatcaatatctgtgttggtttccgcaaaagattctttccatatattatagtcaaaactctctgaccatgcatcgtagatcgcacctttttcatatgctctaaggataacttttgaacaacggcggtcacctcttgcaaggaaaccttcaagaatcgttacatccggctcatgccagctgtagcggatacttctctggtttaactgtgcgcggatctcgctttttacgacctttgctttctccacgaaatcttcctctctgtacatacctgcccactggaatggggtaaatggtttcggtacaaagaaagaggtacttacattgacctgaaccttgccattacgtttttctttcggcacttcttcataataagtttctgcaattttctgagcaagatgagcaatacctttcatatcatcttctgtttcagttggaagtccgagcatgaagtaaagctttacctgattccatccacctttgaatgcttcacctgcaccatgaagaatattctcttcagtcagacctttgttgataacattacgcagacgctgggagcctgcttccggtgcgaaagtaaggctgctcttctttacatcctgtaccttgctcataacatccagggcaaaagcatcgatacgcagggatggcagagagatattgacagcattgccatgaaattcttcgatcaggaagtttaccagttccttcagctcagaataatcactggagcttagagaacttaaggaaatctcctcatgtcctgtattctgaagcatttctctggcacttgcctttaaatcctccacattgcgctctctggtaggacggtagatcatacctgcctgacagaaacggcatccgcggatacagccacgctggatctccagggtaacacgatcctgagtagctttaataaatggaactacaggagctttgatcgcgcggtagtctttagtgacatcggtgatcagctgtttacagactttctcaggtacgccctcttttgcaggtgtaaaggaagcaatggtgccgtcttctttgtaggttacattgtataaagagggaacataaattccgggaatctgggaagctgcaaacaggaagtctgctctggagccgcctgctgccttgtttgccttatatgcatcaaacagagcatcatagacagtctcaccctcgccaatataaaacatatcaaaaaattctgcgatcggttccggattatatgcacatgcaccgccgccgatgacgatagggtcatcttccttacgatcctttgccagaagtgaaacatggctcaggtcaagtacctgaagcacattggtatagcacatctcatatccaagggtaataccaaggaaatcaaactcctttacaggctcctgggattccagggcaaagagaggaatatgttcctcacgcataattttatccagatccatccacggagaaaagacacgctcacaccagacatcctcacgttcattgaacatgttatagaggatcatcatgcccagattggacataccgatttcataaacatccgggaagcacatggcaaagcggatatctacgtcattcttatctttcattacagagttgacttcaccaccgatgtaacgggcagccttgtcaactttcattaaaatttcatcgcttaaagctagagttctcatagtattcctttcagaggttattgtatcaacattgtgttaagcagggaaaatcccccacaatattcctattatatacggaatggtgggggatttcaagggagagtcggatagtttgcagtttttatctgacagtgtcaggctgtaaaagcgtgagtaatgtttcgtatacatatgtattttctctgacaattatagaaagttcctctttggcctgattcagctggtgaaataaattacggacatcagacctgccttctttgaaatgttttgaacgcagatatctgttctgatcatagtaatatcgttcgtccaatatgataacaagacgttttatgtctctcacggcagtaatctcatgttcataaccctgatgtatataatcttccagtaaggcagcagcctcctcttcattatttgcatatacaacagaaacatgcggatagggtttggaggtttttctgtctgtaaggtgtagcatattctgaataaatgaggaaagttccgcgttggtacggatgcggttggttaagtgaaacatctggatttccggcaggttttctataagttttaatgtatttacccctaattcttcaggacatatggcatcttcggaatcgctggaaaatattacaggaaactccccctccgattgcgttaacagaatctgcagtttttctgaagaaagcaaatgtgcttcgtctaccagaactgcactgtaatgtttcagctctgtattttcggtcagctgattgtccgaaagaaaagcaatacgctgtaaacgtttatgcagtattttccattcttttccggcattaccgcagtgaatcatgcatatctgctgacgcctggacagtttcatggcgatatcatagagaagcaatgtttttcctgttcctggaagtccggtaaaacagaaatatccgaaccggctgatacggagtttctttaaaatctggcgctggatatcccgctgctgggaagtcagaaagtattcttttttcaggaaacgggccggttctgtgattggggaaatcagatataattcggcctgaaacagatcgtcaatattcccctgataatcactgctctccttttgcagtgatctgcacagctctgtccagtcggcttctgcaatatgatcatgattggtaagcctgacaaggcgattctgactgctgatatacgtataagactgtatggagcgtccgagaacggaaaggtaataacggttctgcataagctgtttacgaattgcctcctcagatacagctccgcttttcagttcaatatttatgatctggtcgtctttgatctggagaagatcaaattctttcccgagttttggaatctggtaggaatagaaaaagcgcagggaacagactttagtcatatgcgattctaactggcgtaccagtgctttcatactctgaagttcccattcccgtattttgaggaaatattcccggccggataactgacgttccagttttgacagagaatctttattctgatttctcgtaaatgcatatatggatattgatctcataacttttacctttcattttgccggaattcttttatactattatagcaaatatcagcaattgcaggtagcccgaaaacaaaaaacagccaggtggatttttccctggctgttttccccatctaaatcagattcagaaattgttttgaaatatctattatattgtggtttggctgaattactcagctacagcgatagcttccacttcgcagagtacgtttttcggaagctgttttacagcaacgcaggagcgggccggtttgcttgtgaagtatttctcatacacagcgttgaatgctgcgaaatctgccatatcagcaaggaagcatgtagtcttgataacattgtcaaatgtaagtccggcttcttcaagaattgctcctacgttcttgcaggactgttctgcctgtgtttcgattttatcgcctgcaacttcacctgtagccgggtctaccggaatctgaccggatgcaaataagaagtttcctgtcatttttgcctgagaatatggtccgattgctgctggtgctttttttgtttcaagtgttttcatgagtgaattcctcccgtacgatttagtgtgattgattgtctgtatctgtatccatatcttaccaccaaaaaaatatttagtcaacggcaaaaaaattgtcacatggaaaatttctcttttattaatgaaagaaaagatgaaaaatactgacgataatctaatcagtggaagctcttgagccagtttaccagagaatcatgccagatattatcatatactgttttcttcatctggtctgtgacaggaccattgcctgccattttggcaaggattgcctgctgtaattcatctacagtcatgtcttccggggatttattcaaatctacaattactgtcttttccgtttcagcagcagcttccgtattttccggaaaactgttttctgctgatatggctgaagtatcgggagttttttcaggctgaatatcttctgcttttgctgctgcagtttcttctgctgcggttattgttttctgtgcaggagactcagtctgtgtggaagttgtttcttctgtttcttcctgtgcttttttgatatctgcagtttctgtttttacgggtatatattctggcatttcacccgccggaacccagatttcaccgctgtttgcggctactgtcacattgatacgtccaccctgaacaggtactttacggcctgtgagggttccgatatattctgcacagtttcctgccggaaggctcatatctgctgcattatcatcgttatttacggtaatgatcacacggattccatcaaggtcacgggcaaatgcaaactgacggttggtaagctgaagttctgcgtagcttccgtagcttaatgcaggtgtatgctgtcttacccttccaagagctgcaatcagggctgtacatggattcttctgtactgcatctgcatagtctttgatatccagagccggtctgagactgtcatcagagaatttctctttctttccttcaataccgaactcagaaccgtaatagatacttggtacacccggaagtgtatagagtaagacatgaacaggtgcaaaatgtgctttatttgaaagcttggtataaatacgttctacatcatggttgtccacaaaattatagagatcaagatttcccatattctggaggtattttacagtatgtgcgatctcgaaatagttatgatcgttatgtccgctgtagagtgctttatgcagagcatagtttgttacactgtggagcgtttctccatttacccatctgctgtaatcgccatggatcacttcgcccataagccagaaatcttcttttacttctgctgctgtacggcggagagcacgcatgaagtcaaaatcaaggacatctgccgcatccagacggattccatctacatcaaattctgatacccagaaacggatcacatcgcagatgtaattctgtacttccggatttctctggtttaattttaccagaaggttgtatccaccccagttttcgtaggagaagccgtcgttgtattccgtgttccctccgaaattcacattgcagtaccagttaagatatctggaatgttcgcggttttgctgaatatctttaaatgcaaagaaatcacggcctgtgtgattgaatacaccatcgaaaataactttgatctcttttgcatgacaggctgctacaaagttcttaaggtcttcgttcgtcccgagacgggaatccagctttttgtaatctgtggtttcatagccatgtcctacactctcgaataaaggtccgatgtataatgctgtacatccgatttctctgatgtggtcgatccatggaagtaatgtgttcagacgggaaacaggagcactgtagtcattgtgcttcggcgcaccggttaaacccagtggatagatgtgatagaaaattgcctcgttataccagctcataaatgacacctctgttttatttatagtttgaaaatatatacatatcttttatataatagcagatttcgaggatagaatccagtttttttcaatatttttgttttttgaaatcaccgcgtcaatgtattgatgtaaaagaagcttaattgcagcttttccggtaagtctgtctcctgctacacagtcaaaaaatttccgattaattattatggaagtgtttctttttattatggttaaaatttactctacaaaaaataatgtttagggtatataatcaggttagaaatcatgttatggtaataagttttttacaaggagatatagtttatgagacatatagatgaaattcagattgccggaactgctgttctgctttgtggtgcgatgtttgcaatttctgctgtcgctcctaccggaaataccgtatcaaaagcggttacaaactttatagaagcaccggaaacagcagcagaggctcaggcgcaggcagaagaacaggctgaggaggatggatttcccctttatacgcaggaaagcaattatgatgataattcagatgatggcagcagctatgatgattcttcctataatgataatacttatgatgatcaacaggataattctgatcaggaatatgataatactgataatgaggacggatcttctgatactgggaatgatgatcagacatccggtgatgaatcaggggatgactcttcagaccagattgattatccaattgatgatacaacggatgataatattgatggcagtctggatggtacagaggaagataattatgacaatactgagcagataacttactgatctgatataaataaaggctccggttactgatgttttatgaactgattagtaaccagagccttatttatatatcagcaaattacagagattaattttagaatgttttttgcaacaattgttcaaatgattcctgattcataggcttatagtagtaatacccctgaagctcatcacatccctcttctacaaggaaatctaccatttcttttgtttccacaccttcacaaacaataaatttcttggtccgttttaacagatgaaaaatttcctgaaggacgatctttccattttcagacagatcatctgaaagaaaacgcttgtctattttaacttcgtcaaacaggatatcttttaaagtattcagtgaggaatagcctgaaccgaaatcatccatggatatccgtatatttttgtcgtgaaagaaacggatcatggcatttacggcttcaatgttatgaataaaagtagtttctgtgatctcgaatatcagattatgaggttctatctcatacttctctatcagattcattacttttttagtgaaactttggatatcccggaaatgaaccggtgatacatttaaagagacaggaacgattctctttccctctttctggcattggttcatccagataaaagtttcttcgtacacatagtaatccaacgcctggatttctcctgtttcctccagaattggaagaaacacatccggataccagatcgttctggcatcccgctgccatcttaccagggcttctgcacctgcaagtgtctgatctttaccatgtattttaggctgaaaataaactttaaattctttctggcttaatgcgcgtttgaacgagtgaatcgtatctgctttatgctgttctctcatggcaatatcctgagtatattcacatacacctgataattttgtctttgcgatacagcgcacgatgttcgcatgggaaataatctcttctaccggaatattgatatctttcagatagtaaatgccagtattcagatggaaataattgattggatacgactgcaaaatttcctttgtaatctgagtattatgtcgttcaatgcgttcttttatctcacttgtgtcatatccggttgtatcgatcactgctacaaaaatatcggagtgatatctgtttacaaataaggattcctgaaaaagttccattcttttgagcacaaaattcaggattttagttcctgtttcatatccccagtagtcattgatcagatggaagttgctgatatctgtcatgagaaaggcatattgttttgtaccattagcgtttgtgagaatcgtaaatattttctctttcagagaatcagatgaaatgctttgtgcaagcccattttggataatatattgttgtttacttgccagctgttgttttttatattttttatcctggtacattttctgatcagcagttttaagcagatccataatcagataatagtgatttttgcagctgagatcatatcctactgcatagcttaatgggtggtctgctgtctgattgtattcatcaatcattgtctggagacggatattcatctgctcaagctgtgaccaggttgtgtttttctggataatcataaattcatctccgccgaatctggcgagatagctgtcttttgtaagaattctggtgagaaaagacgcgaatgtctggataaacacatctccttcttcatgcccgtatgtatcattaatcatttttaaattattcaggtcaaacatcataatgcctgtgtctaaggtatcatctgcttcctgaagctgctgcagccttttttccagagcttttttattatgtactccggcaacatcaaaaccggagctttgaatcatgcttttcagatagtctttcagcgcaagggagactccgcatccagctagcatcgctatgatcataagcgtaaaaaaagactttccaaatccttttctgaaatggaaaatcatagttgcaagaacacctgcaaatattataaattctgtataacaaagatgtaatataatcttgttcttttccatattgtagttaaaaacctgcctttatccttcttttaatatttttgtaaattgctgataccagcattttttttagcttcttctggtttaagcggcgtgcaggatgattcgctttgccatactcttttcaatcccgattttgcttcccttaaccatgacaatgtaatagccatgaatttcagacagaagctcgacttcacttccacatataaatcccagggattccagataatggcgctgcttttcctgcccgcagactttgcttatccggtatttcttattaaaatctgctaagtttaatggcataattgttccttccatttcttattacatataactgttagacttgactaacataatataccatgatttataacgaaaagaagtctttttttgattgttgagaaattttatcttgtataattaagctttatttcagattacctgtcgtaatagaattttggcttgtatttacaagagtttagtgcgtgtgtgcaaaaatctcttgcgaaataatggtgcgaacagtattttttatacttgatttttacaaaaatgtaatgcatttcgtcttttatatttcgtctaaaaatgatatagttaatacattggtgacagtgaatacttaatcgaaacaagtaagcctcctgcttcaattgcgatgagcactaagtagtgggtagaaacttgttttcacatataatattgagctttcacccgaaatgaaatatattgaggtgtgtttaatttatgtctgaattttccgatttgcttagttcctatattgatgaaaaggaaatcaaagtttactctcttctggaatattgtaaccttgaccgttctaccatgtataagattataaacggaaaacgaaatccgacttccatggaagtattccagaaaattgcagaatttcttcatcttactcccgtagaatatcgtaaatttaaggaggcttacatgatctccaaactgggaaaagatctttattataagcgaaaatacacagaaaaatatctcatgaacttccccagaaatttctccggagaaccggttctgtttctggacgatctgaagaagatgaaggatgagaatgattataaaacagatacagatatccagactccggtaaatacgtctgattgcacagtagtctctactcatctggagttaaaccatctgctgtactatatgatttcttcggaaacacagaagccttccggcaaaattgcgcttttattgcagccggattatggttttctgttaaatatgctttccagtttgaaacctgccggacatctgaaaattgaacatacattttgtatgagtaaaacaaaccagatgacagagaatcatgagatttataatctgatgtatttaaataaaatacttccgttatatttttcaagtatggactatcatccgtattatttctatgaggatatttttgcacattattacagtatgaatggtctctcctgtatgattttgtcatcagaatatgtaattacctgtaattctgattatacaagagggattttttacagggatcctgcggtggtttccatgctctggagtctgtatgattcttatcaggataaatgccagccgctatttctggctacggaatatctgtcaatggataaaaatgatttcaacagtcctgtgtatacagagacaccaaactacgtattacagccggaagcctgtatggttccgtttattgacaggcagcttcttagccaggcaatcataccggaatttcccgacagggataatgctattaaaaagatgacggcattactccaggtgaatcaatcaaaaatggaaaatggtctggcaaatgtctattttacgaaaagaggtcttgctgactttgctgaaaaaggccggataaaagaaataccagataatttttacaggccgcttactgtatcggaaagaatccgcttattatgccgtattcttccatgctgcaaaaatggcaattaccgtctgcttaagaagccgttgaatcagctttctgataatctgcatttgtgtgtaaacagtacctttggatatatgttatttaacaatattcataaccggacgacctgtctgatcatcaatgagtccagtattctgactacttttatggattatctctccagcctggatgacagtgggctctacagtggggaagagacggcggaatttgtacagacgctgattgatgaactgaaaaaccagaagaaagaacaataggaaaaaagaactcctcagagtaacgtattattacagtaatcgctactttgaggagttttttattgttagggcaaagccctgtttgccattgtggagtttttcgctgatccgaaaaacggagctttggaaaacaaataaacctcctgctatgcaggtgagtcagcattgtttcagcttacagaaaaaacctccggtggtataattaatgtaggttcgccaaccgcactaatatacacaggaggtatccatatggataataatagtttatcacatacaaagtggaattgtaagtatcatattgtttttgcaccaaaatatagaagaaaagtagcatatggaaaaattaaacaggatatagcagatattttgagtatgttatgtaaaagaaaaggtgtaaaaattgttgaagcagagatatgtccagatcatgtacacatgttagtagaaattccgccaagcataagtgtatcgtattttgtagggtacttaaaaggaaagagtacattagtgatattcgaaagacatgcaaatctgaagtacaaatatggaaacagacatttctggtgtcgcggatattatgtagatacggtagggaaaaatgcaaagaaaatacaggaatatatagcaaatcagttacaggatgatctggaatatgatcaaatgacactgaaagagtatattgacccgtttacgggtgagccagtaaaacgtaacaaataaagataagcccgaaagggctttgtaggtaaatgatgttgcgcttggcgaacctatttcgatgagtctttagactccagtgccggtaatagacccttatagggtcaaagcaaaccaccggctaagccggtggtcgtgattttgaaatcaatttttgagattttgaaagtttcggattttgactcgtaactttgaaggtactgaactgttactattcatcaatattgtaactgaatctgaaatacatggcaatataaaattatatgaggattgagcaatccggagatatcaagtcagggacaaaagctcaaaaagtcaaaaagaagctgccgctttgcaaagtgttttgctgaaacggcagctccattacgcaatatgagcttctgttttatttacttattttttatttctgttataattgatcaggcagcctgcttttacgatcttcttttcatcatctgtcatatctgcgatatacagagagagttctttcacttctttgccaatcacgtatgctttgatatctttcatatctccgtcaagtgctgctttgattcccggaatatagatgtaatctccaacttcaaattccggttcaccattcatctggaatggaagcataccccagttcataacatttgaacgataacgtttggttgcatattcttttgtgatatttgccagaccaccgattactctctgacagcttgcagcctgttctctggcagaaccatcacctggttttactgcgtagatcatgcttccgatttctgtttcttctgcttttacatcagcctctcccggaagttttgtaatctgctcgaatatttcttttaatgctggctcagcttcaaatacatttccattcgcaactcttgctttttcaagtttgccaacttctttggaacgtcctacatattccggatcacgtctggaaagtgtaaactcagcaagtcctaacgggttggaacggaaggaagaagtctcaccggatggaatcagctcatctgtagttgttacagggtcaagaatcttagagcatactttcagaagaatgttatctgtaagtgggctcatttccggccagtctttaatattcggaccataaacaagggatttgttctcatcacctttttcataaccataatatactctcttatcatatacagtcttgtcaaagctgtattccggtacatctccccaacaatcaagagtttctgctgatgtaaggataccaccgttagctgctgttgctgcgatagaacgtgcatccataagtgcaactgctgacatctgtccgttacctggtttactgccctctctgttcgggaagtttctagtcgtatggcggatacttaaaccatcgttgcatggagtatctccggcgccaaagcatggtccgcagaatgcagtacgaataatcgcaccggcttccatcaaatctgcaatataaccctgttttgtaagattgataaataccggctgggaagatggatatactgcaagactgaattcattatttcctgtatctttaccctttaatgcatgtgctgcttctactacatttgtatagttaccgccggcacatcctgcgatgatcgcctgctgtacctgtaatcccctgtcggtgatcttgtctaccagatgatactgaactttgccctgggaaactttcagtgcttcctgctctacttcgtgaagaatgtctttcaggtttgcattgagttcatcaatctcataaacattgcttggatggaacggaagtgcgatcattggttttacagtgcttaagtctacataaaccacaccatcgtaataagcaacatcagcaggattgagttctttgtaggcatctcctctgccatggatgttcaggaatttctttgtatcttcatctgttctccagatagaggaaagacaggtggtttctgttgtcataacgtcgattccgtttcggaaatctgttgtcatggaagatacaccaggtccgacaaattccattactttattctttacatagccgtttttaaatactgcgccgatgatcgcgagagcgatatcctgtggtccgacccatggatttggtttgccgtccaggtaaattgctactacttccggacatgcaacatcgtaagtattgcagagaagctgttttaccaattcaccgccaccttcaccgattgccatcgttccaagtgctccgtaacgtgtatgggagtcagaaccaagaatcattttaccacagccagcgaacatctctcgcatatactgatggataactgcgatatgtggcggtacatagattccaccgtatttctttgctgcggaaagcccaaacatatggtcatcttcattaattgttccacctactgcacagagggagttatggcagtttgtaagtacatatggaattggaaacttttccattccggatgctttggctgtctggacgatacctacgaatgtgatatcgtgagaagccattgcatcgaatttcagcttcaggttttccatgtccccggaagtgttatgagcattcatgattccgtatgcgatggttccttttcttgcttcttcttttgatacttttttgccagtcattgcttcagcttttgctgcttctgcttcaggtacgatcgttgttccatttacaagataagcacctgtgtcatataactttaccatagtgttttctcctttttctttttatattttcagatatttagttatcaaatctcagctgccttttgtgtggcagatgtatcgttgctttacattttttattgtaagcggttaatgagaatttttccaattgtctaagagaatggcattataactaatttgtatacgttattcatgtttcaggcataccggcttatatcgtttcttcatttcctgaaccatcaggttacggtcgcaatcttctataaatacatcataacagtcctggatacttccgaaagtgacagttttctccagattcaagatggcttttaagttctccagcatatgttctctcgtagcatctttgtgatatattttcaaatgtgcatatcccggataatttctggaatcagcttttgcaatccggtattcggcagcccatggctggatgcgaagcagttcatacaggctgttgatcttctgtttcggctcgatcaggaagaaataaattacattatcgtaaaccggctttttggtatgtacataatttctgtatggagagcgccttttggagtcaaaaattcctttttgggcatcattgtccagcatatcataataaatgactacggtatcatccactacagagttgacgaaaaaatgtatattctgctgtgtcagaaaatctgccatgcgttctgcctgcgattcagacatctgatatttcataagataagaattctctttcatatcatagagaacagctccatccatggcgataacaggatatttcagctttactccctgtatgacttccatcatggaagccggggtacggatggttgaaacagtgaaatgtgctccctgttcgatcatctgatttaattcaattctggaatagggggatagctgatactggctgtcgatcagagtatcatcaattcctgatacaaataaaatgtcattgtttttctttctcggtaagtgtgtactgttgacaataaatgccagtcccacgccgatcagagtgtccattaccctgttaaaaacaaataaaatcggattttcatctgcaatgtgcataactacaatgctgagaaaaacaacacaggaaaaatatgccgcatctgtgcatttcagtacaacggttgaatacaatactactcctgttacaagtgagataagcaggtatccgggaaaagtatcgtgcaaccgcccttgcaggagatatacctggatcagaatgaccagaagtccccagaatgcgccgataaaggttccggttactctttttttggctgttttggcagtgctttcataatagggctgaatacattggagaactgccagtgccgagtaaaaagggattcctcttctgcctcttgcgatatacaccagaaaacaaagtgctacggcaatggatgagcgtaggattctctgtcccggtctgggaaagttaattcttcttttcttcatgtccgaactcctcattgagctgttccagcttccataaaaaaatcgccgctgcgagaatgtctgccgaacctccgggactgatgtttcgccagatgcattcctgattcatttctataagttgtttcattcctgagactgtaaatgccccgcctctcttaagactcctcagggctttgtgtttaagccatttcaggtcactgtaggagcttcttgcaagtatattcgtatcatttaattttgtaattgtgcagagaagcgtgttgatatttgatttgtttaaatcatagccatgtcttctgctgtagctgagattaggatatgcagtaagggcaagtacagggaaaccaagctgtgcctgaccgcggatcccgcgttccccatatttgcgataaagcttttcgccgtaggtatcaggctcttttttttccattcggtggaattctctttccagtacttcttttgtcatctcactggtaaactgaagaattcttgagattggaaaatatccatattctgcgtacatttttcctgcactggcacttaagattcccatggtaaaaattgcacctttgtgtgtgttgactccatcagttgcgcgaaacatggctttttcggcatagatacctgttttccgaatggcgcgaaacagatctgacggactttgattccattccagaccagtgaaaaacatctgtttcaggtatggggtaatggcagatgcacttttctcaaataactggcagtccatgtcagtgtgggctcctgtatcatactgatctacaagaccgggtttcggggtggtatagacttcttcgagaagagcattctggatactggtttcgatgtgatttagcagggaaatctgtgcactttcctgagtttttccgtacatttttctgttcctccttttcgatttacggctatatttttataatgccgggtccagaagtatttccggcccggcatcgttttctttttatggatgtatcatgtgaatttattatgcctgttctacataatcatcaattgtctcaaataattctttttctttgcgtttctcttctttctcgttatggaattctgctcccggaactcttcgcatattcataatgtaacttccaaagatatttgctgttgcataatttaatgttgctgtcatggtgaaaatcctcctctttcttttcatggaactcgatgatttgtttttgtatctgctttaatcagatctgttttctgttacttttcattgtctggctttcgcctttttgatcagatatcttttgatgatttaagtgtaacatctgccaaatgaaaaatctaattctcaaaagctatgttcctatgccaaaaggctatatagtttctgtttgctatatgtcagataattcaataacgctatatactatttacaccagtttacaactttataaatgatagacttgttgatgaatcagctgttttaaggcctttgtcatggcatttgattttatatgtgtttcgatatttttcacgaaagtggcaaaaaatatctgactgcgaatgccctgacttaattcaaaacaaaactcctgtacgctttttgtacggtactcagaaaaatgttcgttctgatagggcagaatcttcatggcacagtaactgatgttaatcagattgaccagcatttcaatccctttgcagcttcgcaccatatagttacaaaaagaccagaacgttttctgttcatagtagcttgtttcaatattccagcgtaacgaatatagcaacagtggaatgtatttcatacggtcacttccggtctggttcaatggtgctttttcctgccatgcacagaaaatctgcagatcttccgggaaaatggtactgaaaaacagtcgttttgtaccatgttctttttctgtggcagtgacataggcaaggacttccctattgccaaagatcttagcgagaacccggcggacaccggtataataatcaccaatcttttcattggaaaacgtaaaatctgtttcaacagaaagatgttttccatgtttggcaggacgtccccgacgaccggtctgtgcaggtgcaagatcatacatgacagaatcaatccttgcattgccaatcagatccagattcggatattcatcaacgatggataccagattctgttttgtataccagctgtcacaaaggatgatgacatgatctttgctgtgaaattcaggcataacctgccggatcatggaggctgccagttccagtttagattcttttttctgccacatacgataaccaagaggaacggaaagataagatactttatccctattccagacaggtacgcagagcatgacactcacaaagcagtgtccattcagatagttggaaccgttgtgtgcggcatggtcaaacagttttgaaacgttttcaaattttgtgccaaatttagataccatcgtatcatccacgcacagaaatacaggctgcgtctgcaatgaatccggtatcagcttcaaagtaatcctgacagtggtattcataaatctggaataatcaacctttgcataggaacatgcataataaaatacattcagtgatttctccgttattccagataaaaaatgctgatacagaaaccggatggaatgtgcagattctaaggtcagtatggataatatcagcagaaataaggtatctactgtcggaacagaaaaagtttcaaaataaatcaaaaaatattgatgaagtctaccaatcagtgttttttcgttgtataatgtttttgtcgtacagggtcactttcctttgtaatgttttggatcaaattcattatacatcagaaagtcctgtacgatattttttttatgaaaaagttgtaaagtggtgtactatttataaaatcataaaataagagccctgcgactggcattttatcgcaggactctgtacttataggagaaattatgtattaaaaaggagtttttggagtatctgaataaattgttaatctgttttcttagaattcgtatggttttacctgacgtacaacatccataattgtgccgtcacggctttcaatgatacctacgattctgtcgccgaactgtaccggctccggttctccggcgatggcatatgccatatcacgaagttcttcaatcgtgcagaatggaattccttttacatctttcatgatatcgattaagtcctgtcttgcaggattgatagctacaccgtaatctgtaactaccacgtctacggattcaccaggagtggtaacggtcgttacatttgtgcagattgcagggatacgcccctgaagaagcggtgagataacaatagtacatttcgcgcctgctgcagcatccggatgaccaccctgggcacctgtgatcacaccgtcagaacctacaactacgtttacattaaagtttacgtctacttcgagagcaccaagaattacaaaatccagtttgttgacaaatgcgcccttgttaaatgggttggcataagcaccggcactgattctgtgatgatttggtctcttaacggattcaactgcggaagtatcgaaatcctgtgtatcaagcaggcatcctaccagaccttcatcaagaaggtcacacataccttttgacataccgccgactgcaaatcccatcttgattccgcgttctttcatgatttttccaagggaagctgcggaagcaatggaagcaccacctacaccggtctgataagagaatccgtccttaaaatatggtgtatttactacaaactgtgtacagtaatctgccatcatcagtttacgtacatctgtggtaggcttggctgcacctgtagcgattttctccggaataccgatctgatctacgacacatacatagtcaacttttgtcatattgatatctgccggatagttcgggaacggtaccaggcagtctgtaacggcaactactttatttgcatgatttccgtcaacaaatgagtaggaaagtacaccgcagtcactcttaccgccgatacctttgcagttaccgtaatcatcgcaggtaggcgctccgataaaggaaatatcaataactgtctcacctgtctgaatcgcacggatacgtccgccatgagaacgcataatggcaagtccttttaatttaccttcggatattgcctgcccgatttttccgcggacacctgaggactgaatatttgtgatcgttccgtcctcaatcatcggaaccagcgcatcatgggcttttccgagagagctggcacagatagtcacatctttgattcccattttatgtacttcttccataaccatgtttacgaccagatcaccgtcacggaaatgatgatggaagcctaatgtcataccgtcatgagcaccacattttaccagtgcttcatgaatggaacttaccattttgctggtgtcatggttcatgacaactttagtgacaggtccctgttttttgaattcggtattatctttataatagattccctggaaaacttctttacctgttttgtccaggatttcctgtggaatttcacgtcctactttatttaacattttacagatccccctcatacacgccagatgcttttgcaagttcaatggttctctttgcgccgtcataaaaagcgatatcgatcatcttaccatctacagtaaatacaccgatacctttggctttcttgtcatcaatctctctgactactttttctgcaaagataatatctttctgctttggcgtaaagatttcatggacaacggaaatctgtcttggattgatgatagatttaccgtcaaatcccatcagatgaatagtctctacgtcctgtttaaagccttccatattgtcaaggtctgtgtagactgtatcaaaacactgtacgcctgctgctcttgctgcgatgaccatattctgtcttgcacccatcagctccagacctgttcctgtgatatgtgtctgaaggtctttggtataatcgccgcctgaaagtgcgataccgaataatctgtcagatgcttcacagatatctaatgctctcatcacgccccgggctgattcgatagctgccatgatcagagttcttccttccggaatgccaaattctttctctgcctgaatcacttctttttctaccagataaacatctttggcactctctgttttagggattcggatggaatcacatcctccggctacggcgcagcggatgtcttccttccagtacggagaatccagaccgttgatacggacaacacgttctacatttctgtagtcaatctcctgcagggcatgatacagagaaaaacgtgccacgtctttttctttttctgctactgcatcctccagatccagcatgatagaatctggtttatagatataggggtctttgataagtcccggtttctgacaatttaaaaacatcatggttcttcttaatcgttttttgtttggattcatgatctgattgcacctccccatggaagattttctttctgttctgctgcacggaatactgcgccttctactctggctttaatggtgcagtccagggcgcccttgtcaacgatgctgattttcacatcagagacaccgagattttcaagtgtctgcattactgttctgcgaatgctgtgtccatattggttgattactgcactgtctaattcaaattcgattccgtgaccttcatttggttctacggtcaccattgcatcactggattccagtgttccggcaactgcacttttcttaattttcacagttaatttcctcctttttgaatgagtgactttataaataactgttcagtaaatggtatcttgtaagtaatgtacaggatgtaatttctttgagataaattcctgaactgttatactttctgattttattgtagcgaatgaaatgggatttgtataatggtataaaagaatgtcgttataacctttttttatctgtggaagataattttgatgtatgaaggtgaaaaaagaaaaacggagcaaagttttcaccctgctccgtcactattattatttaatgaaactatatacaccgataaatgagaaaactgcaagaatcgcaagtgcgataaaagatacagcaaagagttctacgaacattttattctgtggaaatctttcttctgcgttctcctgctgggaaacacctgccatgatcagagcacctgtggtagatactggagtaaatccggcaactgtacctccaactacgattactgccacaagctctgccgcgctgacaccaagacctgcactcagaccactggctgtcggaatcagagtcgggaacacaacaccaagaccggaactgaagaatgacatcagaccagaggcgatagccatgatcattgctgcggtacgttttcccataaccgcctccaaagcagataccataatatcgattccaccggaaatagaaataatattcataagaattccaacaccaagaaccataagaattacattccatggcactgctgcaattgcttttttttcatttccgcatcctaaaaccaatagaacacttccaatcaggaaaccagtcagaccgacattccatgagaagaaaagtgcaccaactgcaagtacaacgagtcctgccagagacagccactgctgaagattaaaagccggaagcttttcctgcacactgtctttgacagaaggatcaatctgccatcctttataataaatatatacaacaactgcagttaccagtgcagtgatggtgatagctgccatgataggtaatgtatttccggttagtccctgctcttccatcaattcccggacgactgcagattcaggagtcaatggactcatacgcccggacataactcccagatccccgatgatagctgtcataattgggtttacacctgcggaaacggctaccggaattgcgataacaggtacgattgccagggaaggaattgcgccaggtcccactgcgcagatggcaaaaccaagaacgtacataacaaacggaaccaggtgttttttctttcctacaaggcgcacaagtttgttagcaagaagttcaagtgtgccatttccattaatgatggcaaacaggtaagtaattccaaccatctgaataaacaacgaggagctgaatcctgctatgatatctttaatactgagattatatgcaattccaagaatcatggaaaaaccaacacagataattcctacgttacagttgcggacaaaaccgatcacaatggcggcaagaagtaaaattaaagaaataagacctaaattcatatgtatgttcctttcctatttaaaagtaatgcatacaggactttcggttggaatgatcctgcctgtatattccatgagacctttatcggaatcaagtttcatttctataattgtatcgctgtcttcgtttgccatataaaatttgctgtaatctttattgaaagtaataaaacgaggagttaatccaagggccgggtaataaccaagttctttcatataaccggtctgctgatcaatacggtatacaacgatagattcatgaattctgttagaaccgatcaggattgttccatctttatttaacaaagatgcacttgcctgtccttctccggtgtatgtatccggaagagacggaagattctgtcttgcctgaagtctgcctgttttttcatcaaattcgaggaaagtcatcttgtttcctttttcattgatcagataaacatatcgattgttcggatgaatagatacatgtcttggttcatcgtattctctggaataataggtatctgtcggtgtcagtgagccatctgaaggattaaaacgaaatacttttaccattccatatccctgaagtcttgcctgagttactacgaaaaggtattcttttttctgatcccagatacactggtgagcaaaagaaattgcaccttctttttttccttccatacagacttttgtcacgatttctcctaatgttccatcggcatttcttttgattacataaacagcaccgccctgcaatgcggctactaccatgtattgatttgtgcggtccggagtgataaagacagggttttttccacctatatcaatggtatttaaggcttccagtcttccatcttcaaggatacggtaactgcttactttagtgaagtctccatgtacggaataaagatatttttcttccagatccattgcctggtaggatggattctcttctgttttcagacactggatttctgtccattctcctgtggattcggagatttcatacacttttaatccctttcctcttgcatttcgttcctttgtggaacggcagcctacgtatgcatagctcataattcgtttcctcctgtttgtttttttagatgcttacacatttgattgttgcgtttcttttgctttaggcattgttttgtgtattttgctttcgctcatctcatttttataattttattataaaaagtgacgatgtaaaaaggaaattcagaaataaactgagcaggtcattccattatggaatggctttatggtaaagaatacatgatagatacgataattgaattgaggaaaaatccacttccttgatttgcgtaaaataaatggtataatcatattgttataaatacttaggaggactttcttatgaagagaaaaaacaaattattgtccctgtttttatccctgtttcttttagtatttacgttagttcctcagtcagctctgacagtaaatgcagaaacagacggagaaatggcagtccattttctggatgtcgggcagggaaatgctattctggtacagtccggaggacaaaatctgctatatgacggtggtgatcagaaccatgcagatgaggttgtgtcctacttacagcagcaaaatgtacagacgattgattatatgatctcgtctcattatgatgaggatcatctgggtggtcttatcccatgcttaaatactttcgaggtaagtaatgtcttaggaccggattatgtacatacttctaatttatttaacacatttatgaatactgctactgcaaatgcgatcattgtacagtatccgtctgtaggtgatacatttgattttggtaccggaagctttactgttcttgcgccaagcggtatcagccagaacagcaatgataactctcttgtaattaaactggaaaatggctcaaacagttttatttttaccggagatgctgaagaaaccagtgagcaggatatgatcactacaggaatgaaccttgactgtgatgtgctttctatcggacatcatggctctgcaagttcaactacatgggatttccttgaggcaacctctccatcttatgcggtaataagctgcggtgtaaataaccagtacaatcatccatcagcagaaacaatgggacgtttatctgatatggaaattcctgtatttcgcacagataaacagggaacaatcattgctgtatctgatggaacaacgatcaactggtcgcagaatccatgtaatgattactcttccggggattcatctgtaaattcatctggtgatgcatcatctggcggatcatcatatcaggaagaaacgactgtttctgaaccaaattctgtgcaggaagattcttcagcagcaacaggtgcaatggtatggatacctgcaaccggagaaaaatatcatcgtatcccgaattgtggaagaatgaatcctgatactgccagacaggttactcagtcagaagcggaagctatgggatatgatccttgtagtaaatgctattaagaaaaaaatcgacagattgatttagcaaaaaaaggtgagcctcacatgattttacgtgtaaagttcaccttttcttatatttttttatacattggtctgatataattcttcgacaagagaaataaaatccataatatccggactctgaaaacacctgtctgagaacatcatccatacatttcttgcaacaggagtgccgctgctgtcatatacgggaatccttctggatttttcttcatctattttccagtctgtgccgaatacgaaagtaactcccaggccattatctaccatttcaatggcaatatcagcatagggaactttatgactctcatgtggcagatttccaaactgattcttccaccattgatttaccgtaagctttacaacaggattaaaataagattcaatcagaggaagatgaacaatatcctccatagtcacatcttttggggcgataatatacatttcttcttcaaacagccgtatcttttctcccatgtatggaaaatcgccgcagataattccaatatcgatacttccgtccatcagtttgtgcatgatcgtatcactggaatcagaaaccgttttaatctgaattttattataacgtgtcatatattctttaaaaagctgtgacatatgcagtctggcaaaagcattaggaactccaatctttacgagttctttcgtagtatgattttctgaaaaatgagtgtcgatctcttttaaaaagtctaacataatgcttgcttttttcaccagatactgtccttcttctgtgaaagtaactccctgactgctccgacggactacttctatattccactcatcttctatagcctttacacgtttggttaaagacggctgtgtcatataaagtgcctctgcggctttggttatgcttcgtttctcatataatgtgaccagaatcctccagtcaatgtccttcataatcttttacatccttttctatataggtgataaaatcctccagtgttctggagattcgtttatttttggaataaagaaaccatgtatttctggttacaggagaaccatctttgttttttagcggagtcaggcatagatcatattgattctcaaaattctcgggcaggaaacagacagtgtagccgattcctctggcaataagctgccatgccacatcaatatatccgactaccatacctgccggaaattctgttccataccagttctcccaccatttttccagaagctctttggtccggtcatttgttttgtagccgatacgctgcatagatggcagagcctccatatccacaggttctctggttacaagataagcttcgttttttccaagtagcgttttatttacagcaccttcgtaatctccccggataaaagctacatcaatactgccttccagcatttttcggaataatacattactctgatcgttaacaactgaaaaatttacgtttgggtggcttgctctgtacttcaatagcagatctgtaagtgtgtatttgctatatgtataggaagatcctaccaggatttccgcctctgttgtttctttgaattcctttaatttttcctgtgtgttttttaaaaacctcaggtatttctctgcctgctgtgcaagaaattcgccctctggtgtaaactcgaggcccttaggcgtacgatttacaatagtgacctgaaactctgtttccatgtgctgaagccgtttggtaagagatggctgagtaatgtacagcagatttgcaacctttgtcatatttggatttttgtataattcatgcagaatttcccaatctgtatctttcatggcttactcccccgtactttttattatcatttgtaactgttttgtatccttacagttacgattgctttgtaattggctttatattttagcaattacatctgccttttactttaacacattttgaaagagattgaaacatattttgcagaagcagtgccggataaacgtgaacagacagggcatttctgccctgccattctaaaaatttatttaattttatgctgtaccggtataagcgaagaattggtaaggttgcgcggaggccttaatggaatacatgtatagccggaacagtcaaaattaacaagttagaaatcagctacggatttttctgattgtttcgataagataatcggtaaattctgcggcacttgcatcctttgtttctgtggtaacgacaagttttttctcagttacggtacagatttcaagtgccctgtcaagaagctcattcctgtctgcataaccgatgtgaatcagcatctgaccgatggcacgaatcaggctgcatggatttgcataatcgcctctgccatggctcatcagatacggagctgttccatggattgcttcaaataaagcatatttatttccaatatttgaggaacaagcacttcccagaccacctgaatgctcggctgccacatctgttacgatatcgccataaaggttcgggagaacaacaacttccattcctttgttaaattcaggatcaagcatctttgcacacatagcatctaccagacgttcctgaatttcgatttccggatattcctctccgaccttgcgaactgctttgatgaagtttccatctaccagttttacaatattggcttttgttacgacagtaacatttttcttgccattctttcttgcaaaatcaaaggctgcttttgcgattcgttcgctgccctgttttgtctggactttgaagtctacagcaaggtcttcgtctacctgaattcctttgtcaccccagatatattcaccttcaatattttcacggaagaatgtccagtcaatatttttgtctgggattttaatcggacgtacagctgcaaaaagctctaattcacgtcttaaaagactgtttgcgctgacaagatttggaagtccgtctcctgctcttggtgtaaccatcggaccttttacaaggacatcacatgccttgatttcagggataatgtctttgggaagactttccatttttgctacgcggttttcaattgtcattccttcaatctgacgaagctcaatcttaccctgattgatttcttctccgacaagttcattaaggacacgaagagcctgtttcataaggattggtccaacaccgtctccaggaagaataccaactatgattttttctttattggaaaaatctgttacttcctgtgaagctttcatccgatcaattcgtgctgattcattttcaataagtgtcccaaatttctcctgggctgttttaatatcgtctttattaattccgctcatattttttactcctgtattttttatttatctgcatccatttctgcaagctgtttttttaaataacgaagttgtccaccacagagaacaacctccacttcattatctgaaagatcaaggttcacctggaaactgaaacctttagttgtatctgttactgttactgttctggtcggaatctggtctaacagattttcaatttccaactcatcatcctggtcaattttgtcataatctgcaggatctgcaaacagcattggaatgataccatggtttacaagatttcctttatggatacgggcaatgctctttgcaatcacacattttactccgagatacatcgggttgatggctgcatgttcacgagaggatccctgtccataattttcaccgccgatgataatactctttccgagttcctttgcatgtgctgcgaaatccggtgcatagcgatgatagcaatactgggacatcaacggaatattggaacgcatacttgaaaactctgcgcttgccggagtgatatcatctgtagaaatgttatcgccaccttttaagctcacaggtaccttcagatattgctggggttcatctggtactggcaggaatttgatgtttggtccgcggacaatttctactttttgagcttcttctggctcaagaggcttgataatcatggaatcatctgcttcgtaaacttctggttcatgaatttctgcaagttttgtgatttcatcacccatgatttcttctgctgaagcaaaagtacccttaatggcagttgcagctgcgctctcaggacttaccagatagatcttggcatttggatttccggcacgacctttaaaattacggttagatgtacgcacagcaattccctcggttggaggagtctggccgatagcacaacatggtccacaggatatctccaacattcttacacctgcgtccagaagcatactgatatagccatcacgaagaagttctttataggtctgtttagaagcaataccgcaggtacagcttacattttcattcacatgatgtcctttgaaaaccaatgctgcttttgccacatcagcgtaacttgtatttgtacagcttccgataaatacctgctgaacaggctttctctctacatctttcagcggaattacgttatccggctgatgaggacatgatacaagtggttccagttcacttaaattgatttcaatacgatcatcatattctgcatcttcgtcaggaagaagctctctgtaggcctcttctctgccctgagctttcagaaacttatgcacctgtttatctgccgggaagatagaagttgtagcgccaagttctgctcccatgtttgtaatggttgctctctgaggcacttcaagtttagctgctcccggacctgtgtattcatatacatttccaagaccgcctttgatagttacacgccggagcatttccagaataacttctttggcatttacacctggttttaattctcctgtaagatgtacattgatgacacgtggcattttcagtctcatcggtactccggtcattgcagtagcgacatccataccgccgacgccgatacagagcattccgatagaaccgccatgcggagtatgactgtcaccgcccatgctgatttttccaggagcaccgaaacgggcaacatggactgtgtgacagataccgtttccaggcctggatacatggacaccgaatttcttagcagcggactgaaggtaaatatgatcgtccggagttttaaaatctacatataaaagattgtgatccagatagctgacactgcattctgtgcggatacggtcgattccgattgcttcaaatgcaagataagtcatgactgcattaatatcatgtgttaatgtctgatcaactttgataaatacttcttcacccggtaccatgcttccggatacataatgggattcaatgatttttctggttaatgatctgcccattggtaatgcctccttgtaatggatatttagttttgctttggattcgctttcgtttaatttttggtttttgcttttctttgatttgtattatagttgagccatgtcagaaaataaaattgtttaaaacaatgcacgtattcctaaaatgaatagatgtttttacgtttctgtttatactcttctgctattttgcatgaatatgacaaaatcccgtcacatacagtacggatttatgtgtttatcatgattccatataccggatcatagcctcagcagcatgttttgcagcttctacagcatgaactaccgttttggaaccatgcacaacatcgcctgccgcaaagacaccttcacgtgttgtcatatagttttcatctacgatcagaagtccgcgctcagagccttccagacctgtggtggttcgaatcagctttcttctcggtccctggctgatggaaataatcgttgaatcggctggaattaactcttctttctcctcacagccgattactttttcattttcatccagaatggaattgcagaatacaggtccctgcccggtgatacgtttgatttcttttccgaaaacaaactctgctccgtcaagctgtgcatatgctacttcatgggaactggctgctacacttttgcctcttgcatagagagttacgtgctgtgcaccgtttctgagtgcagtacgtgccacgtccatggcagcatttcccataccaataatggctactcgttctccaagatcatatgcatccggattggatagataatcgattccataatgaacatttccaagacattctccatgaatacccagatttcgcggtttccatgtcccggtaccgataaatactgcattgtaaccgtcgcggaataaatcttcgattttgaggactgctccgatagttgtatttgggcggatcataatccccatttctgtcattctttttctgtaacgttccaggatggtctttggcagacgaaactccggaataccgtactgcatgacgccgccaatcttatctttccattcgaagatggtgactccgtaaccctgttgtgctagtatgattgccgctgtcatacctgccggtcctgcgccgattacggcaacttttttatctttctttttgacaggaacaactttcatacggtccagataagtgtcggaaatgtaggtttcaatactggaaaaatgtaccggatttccttttcttcccagaacgcagtgacctgcacactgcatttcgtggttacagacgatcgaacagattacagacattggattgttttcaaagagtttctctccggcttccataacctggttctgtttgaacatctggataatctgtggaatcggagtgtgtaccggacatccctgctggcatcctggtttcttgcaattgaggcagcgattggcctcgtctatgatatgtactgacattttgacttcctcctttatgaaaattcagtatgcataagttgtcaatatactgataattaatgatgtgtcgtaactttgaagcgttttatttttacgggcggattactcttggtagaatttctccggtttctttcatttgccggattgtatattgttctgcttttattttggcatcggctcgttccatgattgcctcagcgtcttctggtttgatgaccagaacaccattacagtcaccgatgatcagatcacccggacacacttttactccaccgcatatcactggaacatttaattctccctcacgtgctttgtctgcactccccggagttacatttcgggcaaaaacagggaagcctgcttcctgacaacctttcaggtcgcgaaaagcaccgtctatgacgattcctgccagtcctttcatattggcacagatacttctgtgatctccccagtaagatccggcaccaaagccttgtccggctaccaccagaacatcaccttcttctgcctgtaagattgcatccggaatgattccactaattccttttggcggattaatagtgaatgccggaccgacaatattttgggcagaaacctgtctgcggatatggtaatccattgtgtgatagtccactgctccgtcacaaagctctgaagttgtgtaattgcggagacgtgaaatgattttttttagtttttcggtcatagtctgttcctccttggcatgataggtagtgtaagttaagtgcgagaaatctccataagggttgcgcatgaggcgtggagtttagtggcttttgatgtaaaattatcatacaacccaaaagacaaaatatataattcattatgagaataaagaaatgaaaaaaaagcatatgccatttgctgaaactgaggacttttcagaatcaggcagcacgcatgtatcccatgaatttttgttataattttatagttttttatagtattgtcgagatagttttttctatttaaaataaatcatgaagtatgaataatgtatacctgaacaaatgtagacattattgttgatgattagaatgtaaaagaaggggttccgtttatgtactatatttctcagatatcttttaacgataaaacagcaatcaaacagttggaaaagcttttatcagatgaaggaattcgaaaagattcaaatcttgattatatctgcggcatgtatgacgaaaaaatgaatctgattgcaacagggagctgttttgggaatacgcttcggtgtatggctgtaagcaaggagcatcagggtgagggtttactgaatgaaatcgttactcatttaatcaatatacaatttgagcgtagaaatacgcatctgtttctttataccaaatgtgattctgcaattttttttgaaagccttggattttatgaaatcgcccacattgaagatcagattgtttttatggaaaacagaaaaaatggtttttcaatatatcttaaaagactcctgaaagaaagtacagatatgctttcaaaaagattgccacttttgaaaaccgctgcattggtaataaatgcaaatccttttacattagggcatcagtacctgattgaaaaagcctcttctgaaaatgattttgttcatttatttattgtcagtgaagatgtaagcctgattcctttttctgttcgaaaaaaacttgtgataaagggaacctctcatttaaataatatttgttatcatgaaagtggaccttatattatcagtaatgctacatttccaagttattttcaaaaagacgagcaggcagttatagaaagtcatgcgatgcttgacctgaccgtttttttacagatttcgcatgtccttgggattaaaaaaagatatgtaggtgaagagccaacaagtttggttactgggatatataatgatattatgcggaagaaattaccggcgcatggaattaaatgtgaagttattccaagaaaaaaaatcaatggtcaggtgattagtgcttctatagtacgtcaggcaataaaaaataatgattatgaaacgctaaggcagatggttcctctgtcgacactggagtattttcaaagtcaggaagcaatgctagttattaacaggattcgacagaaatcggatgtgattcattattaaaaaataggttgctatatctaaataagtggaggatttggttatgaacaaacaaaaggttaccattacagatatgatgaaatgtcgtgaaaaaagagtccaaatacagaatgagtttattgcgagatatcatgatccagtaatttctttttgtatgaatattccaggaccaattaaaacttcgccactcatacgcaatggctttgaggcaggtaaaaatgaaattacagatattttgaacagaaatgctttacctgttaatgatctggctgaacttcatgagtttacaggagatgaatggattgcatctgtaaaagcttcagcttcgcaattaaaggaattggcattaaaaatcgaagaagaacatctgtatggacgcttatttgatatcgatattattgatataaatggtgataaattgtctagaaaagtttacagaaaatgtttaatttgtaattgccagagccaggaatgtgctcgttcccgaaaacatactgtcgaagaaatgcaggaaaaaataagagaattactgttacagtaatagatgacaaaactaaggaaatttacaggtattaagccggaggccaaagctgtctgtgacagatacaattaagatagcttcggccaagaccgtagaccaacagaaaattatttcggttaaaacccctcatgtcggcgaactttccaaagtttggcacgtttctgtgcagcttcattctcaatctgctgggtaactccttcaataataagccccggaacttctaccggatgttgatgttcatctgttccgaccattgtaaaataggcgcgattgatcatcgttcttgtaccatcaagtgcctcgcaataggtatcaatacgaacttccatagaagatcgtcccacgtgggtaagtcgtccgatcagaacaatggtatcatttacttttgctccggctttgaaatacatattatctaccgctacagttacaacgttcatctctgcatggcgcttggcaacaattcctgcagtttcgtcaatccatgcaagcagctgaccaccgaataaatatccggctgcgttaagacatttaggcattaataagtgagattgttctgttagtgagtcttctactcgtttcatttttctttctgacatttcttatgcactccctttttatatgtatttctttatttgcttttctatatgtaaatattctgacaatctatatatgaatctgcttttggtgggaaatgttatgcgtatatcgggcgaatttctcgcttaatggaaacataaatatacaaatacagatcataaacatggttattatagcacatctggcttatttatgttacccttctattttatttgtggaatacatttcttttctggaattatttgttagttctgtagaattttaaagcgttatcactttaatatgattgtatgaaaaaaaatacaatctttatcttgcctttcccatcactttactgtacaatatttaaataggtataaatacaaatgttcgccatagtaaaacactgatcgcaaggatgcatctgcaattcactgtatcagtgttttttggtaaaatttggcaggtggattccggtcaggctgctgattatatagtgaacagtaatacttatggcagttctcataaataatgtatatgagagaactgttgtaaataacggggaaatgaggaatgatattatggaaaaacatgaaatgatgagtctggaggattccggacagcttcgtgaaaaaatgagattctttgaacaggaactgctcaggaatcatcatatcgatccaaatctgtatgtagaatataatgtaaaaagaggtcttcgtgactccgctggtaagggtgttctgaccggtcttacagagatttctgatgttaatggttataatctgatcaacggcagacagattccggctgatggacgtctgtactatcagggaatcaatgtacaggatattatcagcggtctgaatggcagacgttttggatttgaagaaacagtttatcttctgatttttggtaagcttcccagtaaagaggaactttccagattcctggatatgatggctgacatggaagatcttggcggtcgttttgtacgcgatgttgttatgaaaggaaccaatgccaacattatgaatgctatgcagcgctgtgttctggctctttatacatatgatgacaatccggaagatatttctcctgagaatgtgcttcgccagtcactggaactgattgcaaagcttcctgagattgcggtatattcttaccatgcatatcgtcattttcgtaaagatgagaccctatttatccgtaatccacagaaaggactttcccttgcagagaatattcttcttatgcttcgtccggatggtaaatatacagaactggaggctaaggttctggatatcgcactgattcttcatgctgagcatggtggtggtaataactccactttcacaactcacgtggtaacttcttcaggtacagatacctactcttccactgctgcatctatcggatctctgaagggaccgcgtcatggtggtgcgaacctgaaagttcagaacatgtttgcagatctgaaagctcatgtagaacactgggacaacgaagatgagattattgattatctcaagacggtattaaataaggaagcatttgatcatgccgggctgatttatggtatgggacatgccgtttatactctctccgatcctcgtgaagtaatcctgaaacgttttgctcaggcactggctgaagagaaaggaatgaccgaggaattcaaactttatgaccgtgtggaaggtattgcaggtaagctgatcatggaacatagaaaactgtttaagaatgtctgcgcaaacgtggacttctacagtggatttgtatacagcatgcttggtattccggaagaattatttactcctatttttgctattgcgcgtatgccaggctggagtgctcaccgtctggaagaactgatcaatgcaaataagatcatccgtcctgcttacaagtatgtaggacatcatacagattttgtcgcttttgaagaaagataaacagatgaaacttattactggctgcggttcattccgcagccgttttatcttgtaaaaatatatttgcatttgttgtatgaggtctgtataatcaaaacaaatccgaaaaggaggtatttttatggcaaaagaacagattgcagttgcagaactggttttaaatatgatccttggaaagacaggcggtacacgggtagattatttcccacagaaaccggattttccgtttgatgcagtttatgagcaggcatttgtgcgtgccacaccggagagtcagggaatctcctctgatctgtttgctgcccttcttcgggaactggatgcttccaaagatacggaaatgcatcattttatggcactgcgtcatgggaaggtaatctgtgaatgtgattttgcaccatatcctaagggaatgtggcatattacacattccatgtgcaagagcatcactggtatggcaatcggcatgttgatcgaagagggaaaattaaagctcgatgaaaatatttatgacattttttcggatcagataaatgccctttcaaaaattttccgtcctgtgatcacagtagagaatctgctgaccatgacaagcggcgtaacttttaatgaatcaggtatcgtgtctggaaatgactggcttggaagctttctgaatgcgtctgtcaatggaagacccggaacagagtttcaatataacagtctgaatacttatgttctttctgcaatcgtgacgaaacgtacaggagaaaccctgaccgaatatctgactccgagactgtttggtcctcttggtatcacgaaatattactgggaaacctgtccgaaaggaattacaaaaggcggctggggactgtttctctgtgcagaagacatggcaaaacttggccagctgtatcttcagaggggaaaatggaatggtcagcagctggtgtctgaatattggatagaaatatctacggcacgacatctgaaaactcagaatgacacctatggatatggatatcagctatggatggaacagcgcccgggaagctttgaatataatggaatgttgggacagaatgttattatttatccggatatggatatggttcttgtcacaaatgccggaaataaagaaatgtttcaggactgtatcatgctgaatatcattcggaaatatttccctgttaattatcatcccgccgatgttctacctgagaatccactctcctatagtcttctgaaacggttgtgcggagaactggaaaatggagaaaataataacagaagtacttctctgcgcgggggatggaaaagaaatgtagtttccagaaggaagcattcagataaaaaatacagctaccgtatttcagcagccgttgatcgcccatctgatcatcacagttttatgcgggctgtaagcggcagaacttatgttatggaacagcagaatattggaattgcgccgttgtttgtgcaggtattccacaataatatgacagatggtatttctgaaatttcttttacttatgatgcgggaaacttttgcgtttcttttaccgaaggtgaggtgatccataagcttcctgttggatttggaaaggctgcggatggatgtgttgatcttcatggagaacattaccttgtagctacactgggagaatttgcaagagatgaaaacgatatccctgtattaaagttggagattacttttatcgaagaatgtgtgaaacgaaaggcacacattttctttcatgaagatgatgaaattgagatcagatggaacgaaacacccggtaaaaaaatgatcctggcaggactgagttctattactgaagaactgtcaggaaacttcctgtataattcgcttctgggagatcataatattacgacgacagaactgctgcaccggcttatggaacagacgattgagcctgctgtaaggggatatctgaagagaccggaagaaacaaacagtattgatacagatgagtgaatataataaagtctcatatacaaaaatgcatttctcactaaacgattaagatgagaaatgcattttgcattttacaggtttattttatttatggtatgcattatttacacggattgccatagttctgtttagtcctgtttcacattgaaagctttcattcccggatatactgcgcttgcgccgagctcttcttcgatacggagaagctgattgtattttgcaacacgttcagatctgcttggagctccggtcttaatctggcaggtattcagtgctactgcaaggtctgcgattgttgtatctgctgtctcgccggaacgatgagaagaaattgcggtatagcctgctttgtgggccattttgattgcttccagtgtttcggatacggaaccgatctggtttaatttgatcaggatcgcattacctgcaccaagactgataccttttgcaagtctttctgtatttgtaacaaacagatcgtcaccgacaagctgtactttgtcaccaagtctggctgtaagtttctgccatccttcccagtcttcttcatccagaccgtcttcgatggagataatcggatatttctcacataatttagcccagtgttcgatgagttcttcagatgtatattctgtgcctgcttttggaagtttgtagtatccttttcctttttcactcttccattcggaggaagcagcatccatggcaatcctgaagtctttgcctggttcatatccggctttcttcactgcctcgaggattgtctcgattgcttcttcatcggatttcagtgcaggtgcgaaaccaccctcatcacctacagatgtggcaagtccgcgctctttcaggatagaagcaagtgcatggaatacttctgcacaccatcttaagcattctttaaaagaaggtgccccaactggcatgatcatgaattcctgtacatccagaccggatgataatgcgtggcatccaccgtttacgatgttcatcattggaactggaagacggtttccggatactccgccaaggaaacgatacagcggaatctcaagagaagttgctgctgctctgcagcatgcgatagatactgcaaggattgcatttgctccaagtttggatttatcttttgttccgtctgctgcgatcattgctgcatctactgcataaatgtcacttgcatcgagaccttcgattgcttcgttgattgttgtattgatgttttctactgctttctgtacgccttttccaaggtaacgagctttatctccatctcttaattccagagcttcgaattcacctgtagatgcaccgcttggagctgttcctcttgctacagtgccgtccatcagatatacttctgcttctactgtcggatttcctctggaatccagaatttctcttccaattactttctcaatttctaagtacatgataaatcccctttcttgttttgcatttggactcctggtacaccgcaactgggatgtaccaagtggatcatatctgaggtacggtttttcagcagaaccgcgatttcagcaagtacagatgtaatccaatgttccgaagaattcagcaggtcttcggatggagttcaaatgatttcattcacgcgagagtttgctatatctaactctatttggttagtatattctaacttttgtaaaaatgcaagagggaaattggaaggatattgagaaagtatttcaagagatatcaatttgtactaaacaagattctatcctaaaataaaaaacttccactaatctatatgcatatagattaatgaaagttttgtcatacaccatctaagatttcttatttattaatgagggcattttacaaatgttgttgtggaataatatttagcattagcgcgataaccacacttttcacatctttgacatgtatatgttgtaatagtacatccaccagatgaatttttcgcatgcgcataaaattttccaggtaccatactatgtgtacataaagcacgtggagacacagtttcttgacacgctatttgaatattatctgaaccaacaaatatattgtcagtttctgtaaaatcaagagaatctataatatccatttcagtataatcgttactaaaatcactatatgaatcatcaaaaataatgtcattaaaactagcatctgatgatgcaatcggttcatacgccattaccgtcccagcactcgccacaactgtcaacgccgacactgccaccataattcctctctgtaacattccttttctcttttccttcatcatgtagttgatcctcctttttaatgttttaaaatcctttccttccttattgcttttatgtccggaaaggttatttttccacacggctgggcgaatatcagaagttgcggcttctaataccagcaaacttgcatagtcttgacgtttttcttttgtacagccatcgacggctacactgtcactgactatttctgctgtatctatgtaaaggaaaagtaaaagatatgccacgggattcatccagtgcagacacagaacgaaaaggcataaaagttttactaaattgtcatgattcttcaaatgcgtatgttcatgtttgtataccataataaaatcaggatgcagaggaaagctctctggaaacacgattttctgacggaaaaatccgatggtacatggaccacaaatctcatccggaatcaggtaataagtaagattatcttcaggatcttcaatcttttcaaagatatagttccggatagaatgtgctcctctccagtatttaataatctcatagattgcgaagataataattcctgctagccagatcctggcaaatatattaaaccattgaggtatccatatgtaatcaccctgcttttcactccagaaagacaaggtgcctgataaataagaatcagcttttctgccaattaacattgtttccggaagtgcatcttttggaagtaaatacttcaccaactgcacaggcaccagataaaagaaaacacctgtcagcagtaatcttcttccgagaatgtaattataattttcacgctgaatcacatataaaagcaaacaaatcacaacaggaatacttcctgaaatggacatacagactaacagttccatttaaaacatcacatcatttcttcttaatgtattctaataagaattctttctcttcctctgtaagtttcttatcagagattagagcgctgacaagggttttcatatcagagactgtatatcctgatacggatggtttggaaatctgtgtagatttgacagtttccgtctcgcccttttctttagcaaatttgtttaatttatcatacagataactgtttctcagtccaaggataaacatggttcccggataaagtaaagatactgttgcagcaccaatcatatataaggtaaatttatgtgtatcgtctacaggaggtttgctcataaaattgataaagaagcaaataccggaacataaggtaaataaaatccagcagacaagttctatttttcttttcattcttcgtctcctgattaatcaggcagatagagtcatttgtctcacctgattcggttaagtaattgtaaatttctgtcacttcttaactacaaatagtctaccatattttgtacaaattaagcaactaatttttgggaatttttcagactttttaacgccattattcgagatttgtcgagaaatcaatttgttgagagaaagccaggcaaaaactgcagtataatctgcaaaatttccgcctggttttttaataggtttatgatttaatgatatttactgaacatgctcattatttatgaagaaatgaaaacagacctttctttttttcatacggttgtgaactgataccttttacttcatatcctgtagcactgatagctgtttttagttttgcttcgtctacaggtttctctgagatgatcacagtttcccctttgctgtgagaagaagtaactttatccacatggaaagcttttctcactgcatcgtttacgtgagattcgcacattccacacatcatgccgtctacttttacagttgttttaatcatgttgttgtcctccatttttacgttataagttaaaaatagccaacagaacttatagcatatgattttttctcttacaataattttatgccaatgcctgggcaagagctttctgaattgctccaaggattccctctgaggaataagtggcaccgcttgcagcatcaattccgtctgctgactgatttcccataatctgaggataaatagtttcccatgcataatcaaagtactcaggtgaatcactgttactctgttcaatagatgcaatctgaccgccctgaatcgttacggttacatttactcttccactgtatccgtagcttgagcctgtataagttccgtcaatatatggtcctgtaggttccggcgtaggctccggagtctcttccggtgttggtgtgggagctggtgtttcctctggtgttggagtaacttccggagtcggagtttcttccggtgtcggggttggggttgcctcaggagttggcgtaactgttacttctggtgttggagttggtgtcacttttgtggtgcctttttctgcctgtttcagaatatctttcattgcgtttatgataccctttgaagagtaggttgcaccactgacagtatcaatgccatcgacagactgattctgaatgatctcattttccaggatatcccatgctttcttaaagaacacaggggtatctgtatgctctgcttccagagacttgatcacaccttttttaatcttagctgtcaacgtaattgttccactgtatccttttccagttcccgtataggttccgtctttgtaaatctgttcgtctcccggcttcggtgttggagaaggtttctttgtaggtttcggtgatggagtgggagttggcgtaacaactgcctggtttcctgacggaattgcctgtgacaatgcattctgaactgcagtaataattccgtttgaagaataagtggcaccactgactgcatctacgtttggagactggcttgcaagaattttgctgatcacaccctgtgcatttgcaaaataggaggctgtttcacttgatgcatctacaatattgatagctgcaattttatggtcagtgacagttacctgaacagtgatcgttcctccgaaaccggttccggagcctgtataggtaccatctgcatatccaccggcaggaacttctgtagttggtgtgactgtgcttcctgcaccaccccctgctgtacctccatttgcagaggaacctgtagatgaatttttctttgttcctgttttaatcttacttgttttttttgtcttttttgatgtttttgaaattgaggttccattggtttcagaagagtcttctgaatcaaaatccttacctgcagttccttgtgaaatcaattctttaatctcatcagtagacataacattattatcggaaaccgatgtagtctccacaggacttttatctgcctgataacaggttacacagactgctgcaaaaactgctgccgcaggaataagctttaaccatggacggaaactgtcctgtttgggtttcatttccggagtcttattatttttctgctcattatttttgtccataaatttctccttcttcaatagttccaggaaatcatattctggtgattactgtaataactgtataaagttttacagccgaaaagaaatcctgccctttctgtgggatacaggatttcttttctcttgtctgcgaatccgattgcaaatatccgcctgacttcagtcaggtcagattattttacagttactttaactgttttggttacaccattgcatgttactgtgattttggcagtaccctttttaatacccttaattgtaccattggatgatactgtagcaattttcttattgccggatttgtatgtaacttttcctgacggagttgcttttgctgtgatcttagttgttttgccgacttttacagatgcagatgttttgttcagtgtaagagttggatttttaactgttactttgcaggttacctttacatctccgcatttagctgtgatgactgcactaccttttgcttttgcagtaactttaccggttgttttgtttacggctgcaacttttgggttgctggaagtaaatgtaacttttggtgcatctgctcctgttacagttgccttcagtgtagttgtttttcctttgtaaacagtggctgttttcttgttgagagttactgttaccttagtatctgctttaacaagagcctctactgctgcgttcagatgagttgtagcttcatcaacctctgcctgagttggcttttcttttgcaagaagatcctttgcttcctgaagctctaactgcattgccttccaggaatctgctgtgtaatctgcttcttttaaggcttctgctttttctactgctgcttttaatgctgttgtatctgcttctcctgcttccggttttacgatgtttgcatctgttgcattaacttcaaatacagtatctgcatatcccattgcatatacggtgattttccatttgccggttccatctgttccttttggaagctggcagcggtaggaatctgtcagaccaagctggattcccattgccttgtgcatccagttatctgctgcaaattttgttccataagatgccagaactttatcaccatttccgtagtaatcccattttacagcatacattttagcaccaagagctccatatccgtcacctgtaatatctactcttaagaattcgccgtaacttccacttgcttcttttactgttgcggtaacattggatgctgtctggagtgcctgatctttaagtccggaacctgtaccgtttgttctggccttgaatgtgaatgttccatcggaaccttttacagcttcttttaagccgtttgtttcagcggtaacatccgcaactgcactataggactgcaaattgttttctccaaatcctccggcaactgtgcttccgtcttccacaaccttgaactgggatttgaaagcttcataatcttctgcttttactgcgacaggtacatatttcagacctactacgttataatggtcgaattctacaacacttccgtcagcttttgtaatctgtcctctttcaggctgattcagctttacagttgttccgtctgtaagaactgcatcattagctgaggtccagtaggaaatctcataagaaccgccgtttttgtcatacatgattgcttcacactggtagcttcctctgtgcaggccatggtttacagtagctctggttactgcgtcgaaaccgcccttgtcaagttcatcatggctgtcttttattgcattggaagctgtgtttgcagcattgtagactccctcagatgcccagtactgtgcccatgtcagacctgcatagacatatttgtagcctgtttctgctgttgcagcgaactcatcttctgctgctgtctgatcgtcaacaaaaggtgtttcctcatcgcctgcgaaagcatcagcagtgtcatctgctgcattaaactcatctgcctgtgcctcagtctccacagcagtatcagatgtaaaatccgcagccataaccggtaatcctgaaaccatcattgctgcacttaaaattgcaggagctgccattttgattaaatttcctttgcgcatacctttaaatcctcctgaatatgagttaataaatatatttccaaactgtccggaaaactgaaatttttgacagttcagagatctttatataagataaacctattcaccgatggaataagtatctttcagtaattgaaatctttctttcatgccttccgtcatccagacatgatcagaatcatctacgaacagaccgtctgcattgtatttcttcaaaagttcttctgccttttcttttcccagtacaaagcatgcagtggaaagtccgtctgcattcaggccgtcatcacacacaaccgtcacagatgtgagaccgcttcttgcaggatatcctgtagccggatccagtatatgatgatatcgaacaccatcttctataaagtatttttcgtaatctccggaagtagataaaaattcagtaccgttcagagtaactactccaaggtaatcaccttctgtgtcccgcggatcagtgacagctacctgccaggctgagccgtcgggtttgcttccatagctcataacactgctgccacccagattcaggatcatgcctgatacattcttatctgcatcaagaactttctttgctgcatcacagccgattcccttacctgcagcccccagatcaagagttactccctttggcatggtaactttatttccatccagagtcaccttgccatatcctacattttcaagcatggaatttaattcatcatctgaaggaatgtgtgggtcctctccgtcaatgtcccacaggcggatcactcttcccatagtaggatccatggctccgccagaagctttcgacaaatccagtacctgttttaaacaggtggcagtttcatcagataccgttgttgtattcccggcattttgattgatctggtatatctgagaactttcttttgtccaggagatccagttctcttctacatcttttaatgcagagattacgtctgctgtgatgtcctcacctgttgtgtaaagagtctctgatactacggtgtccatagcaaagtctgttttggtgtatgtgtttatttcagagtttccccatacagtccgggatgcgcataaaagggaggctgtaataaaaagtcccagtacaaaagagtgtctgtttgtcatatattttctgattccttatcctcttattgttgtttccaactaactctatagactatatcactgtatggatagtatgtctaccaatatagttagttcttactaatcaaattttctcaataagttagcagttgctattttttatcaataacagtgcctgtatgaatatttttccttgggcagactgcagtgcaggcgtgacagcagatgcattcccctgaatgtgcagtatcgccgtcaatatccagatgtgccggacatctcttcttacagagagtacactttgatgcacagtttggacgatttcgtttgaaaagtgctcccggaataatcggcatgattgcaaatactgctcccatgggacagagaaactggcagaagaaacgctcctgtgtacacattccggtcatgatcaggatcagcagaactgttcccacaatgtaggtagatttcggcagtctgcctgttgtaagcatggagaatacatcccatggactcatcccctgtaatttagaatagaatcctgttatgcaggaaagaagcaggaatgtaagaatcacatattttactttctgtaatctgtgcacccattcctccggatatccatgttttttcttttttccaaagcatttcgcacggataaatgcggtaagctcatacagagcatctcccagcgagccaaacgcacaggcataaccgcagaaatgacgtccgaacagaatggtaatgatcaacagtaatgccgtgatatccagaaaggagttccaggttacgctctgctgtcctccgattgcaagaaagatggatttgactcctgcaaatgccgtagaaaaaagagagggcactgctataaaaaatataagctgtatggcggcacggatcagccgtacctttcgttgtttctttttcatgcgttttccgcctttgataatgcgtcatttactgcttctaagataccggtagaactgaaagttgctccggaaatagtgtcaacatctgtgctctgctcgctgatgacactgtttatgacattctcgccctgtgacagataagcactgtcctcacccggtgcactgactacactgactgctgtaatggtatcatcttccagagtcacctgaacagtaatcgttccaccgtatccggttcctgaaccttcgaaggtgccatttttatatacattgtcagaatcatcggtttcttcagaatctgccttatctgcattttctttatcctctgcagaatccttttcagatttattatcagcttccgaagatacatcagaagaagcattactttctgctgctgttttctgttcctcataagtttcctttaatgctgtaaggatctggtcctgctgtttctccagactctctgttttggcagtcagatctgcaatatcctgggcctgttctttatcctttactgttccgttatagaaaaataccgccatgataatcagcaaaagtgcgatcagacgcagataaaagttttgattattcacgttgtttcctctccttcattttatgtttgccggatatgatatctgtttttaaatgaagcaaaacttaatcataactaactttaaaagtgtatcattttcgtatacaaaaatctatatataacagattctgctaatgttgtttttttctcattaagatgaccccggaacaaaatccgaggtcatttattgtgtgaattatttacctgttatcgtttattttacttttactgtaaatactttcttaacaccattgcaggttactgtgattttggcagtaccttttttctttccttttacaacgcctttggagcttactgttgcaatcttggtgttgcttgacttgtaagtaacctttcctgatggagttgcctttgcggaaatctttgttgtttttccaacttttacagttgctgaagatttggtaagtttcagggatggatttttaactgttatcttgcaggttactttgtattctccgcaggatgctgtgataactgctgttccttttgccttagcagttacaacacctttgctgtttacagcagccacttttgtgttgctggacttccatgtgattttatctgtaaggtttgttgtaactttgagagtagtttttgtgctgccttttgtataaagagtcttggaagaagtatttaattcaaatgtgttttctgcttctttgtaagtaaaagtaagattattcttatatcccacagcagttatttcgaaaacagttgtgtctgtcacctgaagatctgtgagatcaagagttccatcttcttttacaatgactttgcttcctcttccggttgcggcatattctgtatcatcaacttttactttgctgatgctcttaatgtatgcagagaactcttctgctgtaatgccttttgctgcaaccagttttgtctcgttactgtcataagaagccggcattttgtctgtatttactgtaaattcagttacaatggctgcatattttccgctggcatctgcaatttcaaccttgtgcgttcccagtgcaagagttccaaccgcaagttttccgtctgtgcaggaaaccgctgttccgtctactgtatactgtgccttgaagtctgccggcagagcctggtcaaaggtaactgctacagatgagtctgtattcataatatctgccactgttgccttgattcctgtagttgtctgcacctttacatccggaacatcaaaagtgatcatgcctttatctgtgtaataagtaacgctgtcaattgtttttcccatgattgatttataatgtgcagaagaaacagggcatccgtgaacttctgttgtatatcctgtaccccaggcaagcttgcttccatgccagatattttccagatggcggaggccatagttggttccgtctgtagtatttacggttacaccataaattttatctgtatctgtatcaattactgctgcaaaagcatccttgttaagatcaagctcataatcaccgtaatttgtttctgttttcaatgcagcatcaatggcaacggtctttgtctgcgcacctttcattgctgagaaagaatagctgccgtctgcatttacagtaagttctttgtaataagacggtgtttcgcttaaaatgtaataagagtaagaggcattttcaatcagggaatcttttcctgtataggtgttgctgcttgtctgtcctttgtttgtcactgtgatcgttacagagtcggaatctgtgacctgcttctggtctttcagaagggaaagatcactgacctttacagggaaagtaacacctgttacatcggttccattggggtctacgtgataagcggaatttccgttcatcttacctgcagttcttgttttattaagagttgcagatgtaaaggcatccacttttacatcgttatttttcagttctgccttgtagaaatcatcatatgggatattcataagcacataagcttcgccctgctgtgcttctgcagcaaaagcatcctggacatcttctgtggtaaattcttcctgcgcatcctcggcggcaaactcttcggaaacagagaaatctgtgctgtctgtaagtacctcactgtctgtgaaatcagatgccagaactgcatatggcatgctggtcatagcaactgcggcactcattacaacaggtgctatttttttcataagttttttgtttgtcatgtttttctcctcttctaaaattttttttgcggaatcactcttaccagagggttaatcaacttattaaccaaagggattttacttttaccaaaagggagtgacttctgccaaagatattcatataggattgctataggtatgctgccagcagtaatcatgtggattagccactactaacttataaaatagtaacatgtctgtctgaaaaaatccacacttttttaccggggatattcgtcattttttctcaataaatgctttcagtaaaaatcagtattagttacatctaacttgtggttgcgggaatattttttctgtgttaaaatgtctgaagaattctgataattccattttggattttttgagaggagaaaatagatttatgaagcaaaaaacagcctgccttgggcttttttcagctgtggcgattattttgggatatgtggaatcactggtgccggtttttgcggggattccggggattaaacttggacttgccaatctgggagtactttttattttgaagaaatattcatttagggaggctgctctggtttctgttgtccgcattctggtgatcggatttatgttcggaaatctgttcagtatcctgtacagcctggcaggcgctgcgcttagtatgacagttatgacacttatgctgagaaaaacctccttcagtctgatcggtgtcagcgttgcaggaggtgtttcccataatatcggtcagttgatcattgccatgctgatcgtacaaaatgcaagtgtgtttgtatacgcaccggcacttctggtggcaggtgttgctgccggggtggtaatcggcggacttactaacgagattttgaaaagagttcatctataactttaaaagcatcagttatctgaatttataatctttcagataactgatgcttttttcaatcttcttctatatgttcccgtccctggttgatgatcgtgcggacatgatcatctgccagagaatagaaaatagattttccctctctgcggctctttaccagtttattctgtttcagaatacgaagctgatgagagattgcagactgagtcatattcaatgctttagcaagatcgcagacgcatacctctgcctcaaacaaaacaaacagaatgcgtattctggtagagtctccgaaaaccttgaataattcggccaaatcataaagctctgtttcttccggcagggtttcatctacaattttaagcagatcttcatgtatttcattactctcacataattcttctttgcatacttccattttcttacctgttacctttccggcttatcacaaaaggtttctgctgatttgcctgtttcttataaattctttacaaataatgtacggatcgcgtttaatactgcgatgatcataacacctacatccgcaaaaatggccatccacatgtttgcaatacctaaagctccaaggatcaggcagagaaccttgataccgatagcaaagtagatattttcatatacaatgcggatacatttacgtgcaattttaatcgctttggaaatcttcagcggatcatcatccatcagaacgatatctgctgcttcgatagctgcatctgagccaagtgctcccatggcaataccaatatcagccctggataatacaggagcatcattgataccgtcacctacgaacgcaagtttatccttttcagacttctgattaagaagttcctctaccctggaaactttatcagcaggtaaaagctcgctgtaaacttcctggattcccagttcttcggcaacctgatccgcaacacgttttgagtcgcctgtcagcataacagtcttgctgattccggctttcttcagttcagcgattgcctcttttgcatgaggtttgatgatatcggatatcaggatatgtcctgcatatttgccgtcaatggctatatgcacaacagttcctacatgatggcaatcctgataagcaatgccaagtctgttcattaatttggtattaccggcagctacagatatgccgtcaactttggcaatcacaccattaccactgatttcttcaatatcagtaacacgatttctgtcgattggttttccgtatgctttctgcaggctcttgctgatcggatgggaggaagaacactcggcaagtgctgcatattctaacaatttctcatcaggcatttcattgtgatgaataccacttacttcgaagacaccctgagtcatagtacctgttttgtcaaatacaacatattttgtctgagccagtgtttccagatagttggaacccttgaccagaatgccctgattgctggctccaccgattcctgcgaagaaacttaacggaatgctaatgaccagtgcacatgggcagctgattacaaggaaggtaagggctctgtagatccagtctccccacatggcaggttttcccataataagaagtacgattggtgggataagcgcaagagcaagggctccgtaacatactgcaggtgtatagtatttcgcaaatttggaaataaagttttcagattttgactttctggagctggaattctctaccagttcaagaatcttggatactgtagattcaccgaactcctttgttgtacggatcttcagcagacctgtcatattgatacagccactgatcacttcatcgcctgcttttgcatcacgcggaagactctcacctgtcagtgcacttgtatttaatgtagaagttccctcaatgatcactccatcgatcggtactttttcacccggctgaacaacaataatggttccgatcccaacttcatcaggatcaacctgttccagcgctccgtctttctctatgttcgcataatcaggacggatatccatcagttcactgatgtttcgtctgctctttcccactgcatagctctggaaaagttctccaatctggtagaaaagcataactgcaacaccctcggaataatcgccaaggagaattgcacctactgtggctacagccatcagaaagttctcgtcaaacacctgtttatttaaaatacccttaaatgctttcttcaggatatcatagccgatgaccagatatgggatcataaaaagaacaaatctcaggtatccctctgccggcagtaaggaaaagaccacgatcagcactgctgctatgataattctgatcagcattttcttctgcttcttgttcatatcaatacctctctcttcttataaaagcaggaccgctgcaaaaaactttccggcgaaaagctcagtgccgggatacgttttatgcaacagtccattctccggataactcagaattaaagataaatctcacagtcgtcttctaccttcttgcagttctttaatacgtctttcataactgcttttggatcctgtccgtcttcgaattcaacgatcatcttcagcatcatgaagttaactgttgcatctttaacgccggctgtattcctggtagcttcctccattttattagcacaatttgcacagtctacatcgattttataagttttcttcataatattttccctttccgctcatctcttttatattaacatatgagcacttgttcatttgtttgattttattatagcattattttctcttctgtcaatagttttgaggagatttctttacggaaataaaaagttatgttataatccatgttattatagtttaacgtgttgctttaatgttttaaaaaaggatattattatccggcaggtatcaaaatcataaaaagaaatatgatactctttgacagaacataactgtctgtactgtttgcgtacagcagttcacagcagcaatatcggaaagaaaaaaggagggtatcaatatggcgatacatgaatcaggagaagattatctcgaagcgatccttatgatccaaaaaagaaacggtaatgtccgctctatcgacattgcgcatgaactgtctttttcaaaaccgagtgtcagcgttgcaatgaagaatttgaaagccagtaattacattacgattgatgagaacggatttatcaatctgacggaaaccgggcaagaaattgcagataagatttatgaaagacatacctttctgaccggatggctgacttctatcggagttgacccgaaggttgcagccgaggatgcctgtaagatggagcatgcgatcagcgcagagagttttgctgccattaagaagtctattgcaggcacgcatgaaaattatagcaatcctcgtaaataatgcatttaagacagttcagcagcgtgcgaaagacaaggaagatatctgcaggcgtgctgacgcacggcaaagatatctgacgcaggatttcacactctgatgggctggattaagatgcattattttagaggattgctataaataaaaacataataaaaaccatatcccggattttcagagactaagcatctgttgctttatcatgaaatcccggatatggttttttatggttatctttatgcttcctcttcttttggaagaagatttctcatacttcttaaactgatagtcaatgttgacatgttatgaagcagtgcagatgttgtaggcataatgatacctgtaactccaagtgcgatcagaccgccgtttataccgataatagttctgtaattattgtggatacgcttcatcagcgctgtactcagtctctttaacgtaacaatctcatggagattatctgcagaaattgtaacatctgcgatttcacgtgcaatagctgcgccatcactgatagcaattcccacacttgcagaagaaagtgccagagaatcattgatcccatcaccgatcataataactttatgacccagttctttttctctctctacaaaagatgccttatcttccggcaggacttcggagtaatattcatctactcctacacgtttcgcaatagctgctgctgtacgttcactgtcaccggtcatcattacgacttttgtaatgccggcttcttttaattcacgtactgcatctgcagcctcttcacgaagcggatcttctacacagataactgctgcaagttttccttcgattgcaagatacaggtgagaacattctaatggcaggtgttcaaatctgtcttccattccttccggaattacacacttttcatcttccattacgaaatgccagcttccgatcactgcctttttgccttcaatagttgtagaaataccatgagctacgatatattctacttttgaatgcatttcctcatgaacaagatgtttctctttagctgcattgacaactgctcttgccatggaatgagggaaatgttcctccatacatgctgcaatacgcagaagctcatctgaactcagctcttcactgaaagataccacatctgaaactacaggctttgcttttgtaagtgtacctgtcttgtcaaatacaatagtcgtggcatcagccattgcttccatatatttaccgccctttacagtaatactgtgagtacttgcctcacgtatagcggataatacggaaacaggcatggcaagcttcagtgcgcaggagaaatctaccataagtaccgcaagggttttcgtcatgtttctggtaagcagataagttatccctgtacctgcaagagtgtatggtacaagtctgtctgcaagatgttctgcattactttccacagaggacttcaacttctcagaatcctcgatcatgttgacgatcttctcatagcggctggaacctgctgcttctttaaccttaacagtgagttcgccctcttccagaacagttcctgcataggcaaagctgccttctgctttacgtacaggcgcagattcacctgtcagagaagtctggttgaccattgcttctcctgctgcaacatctccgtcaaacggaatcacattacccatatgtacgcgtatcagatcacctgctttaacagaagaagcaggtataagaacctcctgtccgccttcgtttacaaaccatactttctctgcattgatagacatgcttcttgcaaggtcattgacggatttcttatgtgtccattcctcaaggatctcaccgattccaagcaggaacatggtggaacctgcagtattgaagtcaccgcggagcatagatacaccgattgctgctgcatccagaacaggtacttccagtttgcccttcatcagagtacgtacaccatgataaatgtatttcactgatttcactgtagtaatcgctacacgtaccgggtatggcagaaacattttatttaatgtacgcattactacagagttaatcagtttttctttataggtttcgtttaattcacgtccggaattctcaagtgctgattcagatacctgagcagtttcataggaaaatctgctcagtaaacgaatcagcccgtctctgctgccggtatagacaacagtgacatcctgagttcttacataaaccgatgccttgctgatatttgcctgattctccagataacactgcaaaacatctgcctgtctgtaggtcatgtgtttctgggcaaggtgaatacggattcgtccttttatttcatgcttaatagcaaatttcattatttctcgctgccttcttctgtttcttctgtctcttctttgaaatctgttgtctcttctttgaaatctgttgtctcttctgtttcttctgctgcttcgtcagctgtatcttctaccacttcctcagctgctgctctgtcttcgttgatctgctgtgcttctgcataaatatcctcagcattctcctgaattgcggaagctgttttcattacacatgcctttgcacgtaaaacggctgctgtgcagtttgtgtataatttctttgcatctttacttgtaagaatcttgatacctgctgtaccgaaagctactcctgctgcaaagattcctgtttttttaccgtcaaatttaatcattgatgtatcctcctgttgtgattttaatttattgtaaccgctcagcaacctttcggtgctgagtggttatgaactattttcagataaatatgatgggcaaacgcattattgcgacatcagcttatttacatttcatgtattatacagccaaaattttcatattgctactatttttttctaattgagaaatgttctcatttcagatatattaagaaggttgacagaaactatatcgccaataaaggacaaaaacctgaagaaagataagaaagccaccggaaattatactcttcagtatttcccggcggtcatcagtttgttctatatttaaatttttacttgttttcaatgtttatttaaaatcacaggaatttacgaacatccgctcgatttcctgtttgtcaatgtatccacaggctttcagtcctgtcaggactacattgttaaaactgtcttttgataatttctggactgtattatcatccagctcgatggtgcatacactttcatctttacaatccggatttctcacaatcttatacatatttcttctgctgatcgcaccaatttcttccaaaaggtttaccatacggtacaccgtagctgatccgatgcccggatccaggcgggatgcgttgtaatagatttctttacagcaggaacactcattttcaagaatgacttccaatagcattcttctctgtttggtaatcctgcatcctcgcttctttaattcctggattacaacatctttctgcattcgggttctctggtaattgggctcttcacaattttcctgtctctgtaatgctgctgctcccaaaatcacatcatccttccgcttgttaatttctgtttcctgacatatggctgctgttttgcatcaggcttcagtaatatgcctgattctcaatggcaccctttgcagtggctgcagtctccgccacatgatgacttgccactttttttgtctctgacgattccttttatgatcagtccgacaatcaaaaccaaaattgctcctacaatcaatgttcccataaatgacacctcctgctttatatcattattatacacatataatcactatactgcaatctgataatcagcagtccactaactgtgaagatactgagtgttactgttcacttcgttttcagcaacacgcttcgcgatgaaaaaggtatgaaaccgttgcaattttgtttatcagaacccgcaccaccagatgggacgcaggctctgatcttattactgttttatctggcttttgccataccctttacctttacattaaggctgccgctttccttataaggtctgaacagcagatataaaaatccgatgataattgcgaatgcaaccactgtccagataccgaaaccgccgcctgtaaccagtgtaccgatctgatagatacacagagacacaagatatgcaagtccacactgatatccgattgcaaataaaaaccattttgtattgttcatctctctcttgatcgcacccatagctgcgaagcaaggagcacaaagaaggttgaataccaggaagccgtaagctgcgatcggtgtcatggctgctgccaggttaccccagatctcagcaccgtcttctgcaacttctgcgaatccataaagcataccaaatgtagctactacattctcttttgcgatcagacctgtaacagctgcaactgccatcttccatccttcgccggcttttgtccagccaagaggtgcaaagatccatgcgattgctgtaccgatcttagaaaggatactctcgttaagttcttcaaccataccgaagcttccgccttcccatccgaagctcattaagaaccacagaatgattgttgaaagaaggatgattgttccggctttcttaatgaaggaccagcctctttcccacatacttcttaagatattgctgactgttggccagtggtatgcaggaagctccataacgaacggagccggatcaccggcaaacatttttgttttctttaagatgataccggagcagataattgctgcaataccgacaaagtaacaacttgttgcaacccatccgctgtttccgaagaatgcacctgcgatcatggcaatgatcggaagtttagctccgcagggaacgaatgtagttgtcatgattgtcatctttctgtcacggtcattctcgatcgtacgggaagccataacacctggaacaccgcatccactgccgataagcattggaatgaaggatttacctgaaagaccgaatttacggaaaattctgtccatgatgaatgctacacgagccatgtaaccacaggactcaaggaatgcaaggaatgcaaacagtacaagcatctgaggtacgaaaccgagaacagctcccacaccggctacaataccgtcaaggatcagtccctgtaaccatgctgcacagccaatcgcattcagccctgattcaattgccggaggaatgatctcaccaaacagaacatcgtttgtccagtcagttacgaaagcaccaactgtagttacagatacataatatacaataaacattacaactgcaaagatcggcagtgccagccatctgttggtaacgatacggtcaatcttatcagatgtagaaagcttatcttttcttgccttagtcacacactgaccaatgatagaagaaatataaacatatctctcatttgtgataatactttctgtatcgtcgtcaaactcattttccatttctttgatctcggcagatacatttacggatgtattcatctgctcaatgatcttgtcatctctttcaagaagcttgatcgcgaagaatctcttctgttcttccggtaccacaccggtcagtttattctcaactgctccgataatctcttctgctttatcacagaattcatggacaggtgttactttcttatggctctgggcaatggaaactgccttgtttgcggcttctgtgatccctgttcccttcagagcggaaatagtaacaacttcacagccaagtttctttttcagcttatcaatatgtattgtatcaccgtttttctcaacgatatccatcatgttgactgccatgatgaccggaatcccaagttccaggatctgtgttgtaagatacaggttacgttcaatattggtaccatcaacgatattgatgatcgcatccggtttttcctgaagaatgtaatttcttgcaactacctcttcaagtgtatatggtgataaagaataaataccaggtaagtcagtgagaataacatctttgtgtcctttcagcttaccctcttttttctcgacagttacacctggccagttacctacaaactgatttgatccggtcagtgcattgaacaatgtcgttttaccgcagttcggattacctgcgagtgcaatttttactgacataatctctctcctctgatttcttgatctttctcattttgatcactttacccaatctttctgctgtcgatatcattctcaacagttattagtcatcactaatacttagtttttgttaactattagataacgctaattgttagaaagacctaacacgatgtcaagaaaattattctacgacaatcatttcggcatctgctttacgtaaggataattcatatcctcttacagttacttcaacaggatctcccagaggtgcaacttttcttacataaatatccacgcctttagtgattcccatgtccatgattcttctctttaccggaccttcaccggtaagtttctgaacccggactgtctctccaacacgtacttcctttaatgtcttcaagcctatttcccttctttccctagaattttaatgcttttctcacaggaagaattatggttcagaccataatcttacttgccatatcttttccaatggcaaccctggattctttaacatttacgatcaggcttccgttaatctcagaaacaactgtgacaactcctcctactacgaagccgagctcctcaagatgtctcttcacttcttctttgcctccgatccttttgattgtaaaaggttcacctgcatttaccattgataacggcatttcttcatcccttcctttgcatttaattaatgataaacattatctttatcatgtggttagtgtattctaattttggttagatgtcaataactttattgaaatttttaatgataaagtttttcagtttaaaacattaatattttttttcattaatttatcactatattatgcaatatatacaagaaaagtatttatcagcaacgtgcttcgagaataccgttgagtgcatttccactgctggtatggcagcgcacaatatctgtagaagcgccaacctcgtccagtgcgcattttaccatcttgtgggatacggtatttgtaaaaagtaccagaagatccggacatcctatcttttttccgaagtcggcttccatctgtgtgaagactttgcatttacatttataagatttacagatttttttgtactgccctaccattctgtcatgtccgcctacgattacaatactcatgtattatcctccttttgttcttttagatatattaatgtggggattggaaagtatttatcccttgcctgataatcgggcattgataatactttgggtatggttaactttctctaactgtaagttagtataaactaacataggctgcttgtcaatatcttcatgaaaattttgcgaaattcatccaaattgtgaagcaattatttataaaaaagaatcctgcttgcaggattagcaggattaatttcctgtaatataataaaactgccatacagtaatctaactgtacagcagtctttatgtatttgttaatatctgttatttttcgggattggaatcatcattccggcaatgccacatgatccagtattccggtaagatgtgcgatggttatcccgtaattggtcacaggtacctgtttcttctttgccctgtcgatgcggtacatcacatatttccggttaaacatacatgctccgcactggatgatcagatcatatccggtaaggtcatccggaaaatcggttccgcttaccagctctacctgcaggttttctccaaatcgttttttcagcatccggggaattttcactctgccaatatcctctttcagaggtgcatgtgtgcagcattcggcaatcagtacatgagaagtttctttcagactgtcaattgcttttgctccctctatgtagtaagaaagatctcccttgtatgccgcaaacagtacagaaaaggaagtaagcatgctctcttttggtttgttctcatagatgtatgggaacacctgagaatctgtgatgatcagcttcggtggtctggaaagagtctgcaatgcagccggataccggtcagtagttacactcattatgagacatcttttatccagcagttctcgtagagtctgtacctggggcaggatcagccgtccctttggtgcctggatatcctgtggcattacaaggagtaccagatcatctttggaaaccagattcccggtgatcattctgttaccgtagccttccgggattttttctgtcagaagctcttttaatttccggattccctctcccgtttcagaactgacaggacagactgtttctcctgtatttttctgaatcatctgaatcagatattctttttgttcctgtgtatatagatcagctttaccaagcaccgggattaccggtgtctgccgtttcttaaaatagttataccattttaattcctgtaccatttcatccccacagaaaaggatgatcgccagttcagttttctgtgcagccagactggttttttctattcgtaatgcacccagttctccttcatcatcaaatcctgccgtatcgatgaggatacagggaccaagaggatagatttccattggtttatatacaggatctgtggtagttccggcaacatccgcaacaatcgatactttctgtccggaaaaagtattgataaatgaggattttccactgttggttttgccaaagattcctatatgcagacggtttccggaaggtgtttcgttcaatgtcactgccatattaatcccttctttcaggtgttgttattgatcgttaaaagtgcagagaatgtcagaatcggaaatctctctgtccgtttacaatatctgcaaggtgttcctctgtgagtttccttatcttttcgcccgggatattttccagttctttttgaatcagctccagtccgacttttttcgtctcagggcttgcataatcctggagatattccatcaatgtcatcagcgcattgggatggcagcagttggaaatctgtttacttttgcacaaagacataaaacggtcacctgttcttcctgctctgtaacaggcagtacagaagcttgggatatctcccatacccatcagccagttaacgatttcatcaagagatctctggtcactgacgtcaaattgtgcagatgtcacttcatcttctgtttcaggaacgtcatacccgccaacacttgttctggaggcaccgctgatctgagaaactcccagaggaagtactttttcacgaactgctttactttctcttgtggaaatgatcattcccgtatatggcacagcaatccggatcagtgcacagattttggcaaaaatttcatcactgatactgttatcaaaagcagaaggatcaatatcatccgcatgtttgatacgaggcacactgatagtatgaggacctactccatgaactgcctcaagatgttccgcatgcatcagaagcccggcaaactcatatctgtaaagttcaagaccaaataatacacccagtcctacatcatcaatgccgccttccattgcgcggtccattgcttctgtatgataggcatagttatgtttcggacctgttggatgaagtgtttcgtaactttctttatgataagtctcctgaaaaagaatgtaggtaccgattcctgcatcttttaatttcctgtaattttccacagttgtggcagcaatatttacattgacacgtcgaatggcaccattcttatgtttaatgctgtagattgtctggatgcattccagaatgtactcaatgggattattgatcggatcctctccggcttcaatagcaagacgtttatgtcccatatcctgaagggcagttacttcttttacaatttcttcctgagtaagttttttgcgggcaatatgctgatttttcttatgatacggacagtacacacagccgtttacgcaatagttggaaagatacagaggggcaaacagaacgattctgtttccgtagaattctttcttgatctccgctgccagatcatacatctcctgaatcttctcaggaatgggacaggcaagaaggacagaggcttctctgtgggtaagtcctttacattcttttgccttcgcaaggatctggtcgatcagcgccacattttctttgtttgcatctgcatatgcaagggtttctctgatctcttcgtcggaaataaattcctctgcttttaatgattttggattatacatagatttgtttcctttcttttcggtcaggggcttccttatctgccgctttccgattagttttttctatattcagttttatgttccgcttatcgcggatgcttaagttattcaggagtgaactgcagtcatgctttataatcgcctctgtctgtcactacttcataaccaatgctcttcatacgtgctgccatacaggctttgcattcagcagcttcatcacctgtacagatcttattatcataaagggtatacttatcccggacattgaccggtgataaattgggcattactacattggcccctgccaaaattcccttctctctgcccttggggtctatggttccaagggctgttgttgccggaagaagcgcgtgtgggtggatcaggcggataattgacaataatcgcagagtctgctccagagttccgggtaattctttagcaaacgaggtgtctttgtgaggaataaacggtccaattcctatcatttcaggctttaattccttaataaataaaagatcgcggtaaagtgtatctgcagtttgtcccggagatcctaccatgaatccacatccggtttgatatcctattttcttcaggtttttcagacaattttttctgaaaaccagggacatctgttccgggtgaagttttttgtaatgatcttcatctgctgtctcatgacgcaagagatatctgtcagcgcctgcattaaaatatgcctgatagctttcttcactcttttctccaatagaaagagtcactgcacagtcagggtatatttctttaatcgtgcggacaatctgacaaatatgttcatctgtgaaatgcggatcttctccgccctgcagaacaaaagtccgaaaaccaagattccatcctgtttcacagcaggacaaaatctgttccaaagaaagccggtatctgtctgcatccgtatttgaacagcgtataccacaataataacaattgttcttgcagtaatttgtaaattcgatcagaccacggacataaattttatttccataaattgcttttgcggtctgttgtgctcttcttcgtagttcttccgttaccagtggattctgtgtatgtaaaatcatttccagttcttctctggtaatattctgtgtctcctgaatgtgttcaggtatctgcaactctgctgatgccatatattttcatttcctctaagctttcgaatagactgtttttgctgaaacccctgccagccggccaatttttccggtcagtgcattgattatatccagaggtgcatctattgccacactgataatgcttatccctctctgcctgtaaggaatccccattctgccgatgatataaatgccatattcatgaagaatcctgttcagacattctacagaatctgaattctctactataatactgatcactgcaattctgctttccatagaaacacctctcatataattagtcaacttatctgcacattagaatttacaaaagttaacaactctctggatctggtgactgatcggatagtaatcataaccataaacccctgtcatccagccggcatactgtgcttccggatcataataaagaccattgatttctacccagcaatgacgggtgaagccatctgccgctccatctctgcttcccggtacccggccacagatcatatacggtgtatatcctatttctcttgcaagagcagcaaaaatacaggaaaatccataacagttgccatatcctgtacgaaacatcctcaatgcctcactgcgcgcccagccactctggtaaatgttaggatccggaccaccatagtaaaatcctccgtaaacaacatatttccaacatgcataaagcttctggctctgactcatacctgaatttgtgattgacgatacaatctgcatcacacgcattttcagcagagcattataatcttttcttgcagcaccggaattggtaaaataaagctggccgttctgtctggatttcttctgatacagccttccttttggatccgcataatacagattattcttatagataaaatatccaatgctggcacggccgtgttctgtccttatatgataaatattggatccggattttacaattttattctgtttattctcaaataaacgtcctttctcatcaaaaacataaactacattgttgatacgctgtcctccccgcacagcatttccatttgcgccaaaataatacttatagccattatatctcttccatttgttcttaaccatttttcccttataataatagtaaatcttatttccctttgtaaccagttctcttatgggaaccggagatggcgtcggggataccccggactgctctgtaacaggaatatcactttccgcagcctgtacaccaaataccggcactgccaaaacagcaactgccattatgatataaagtaattttttcagtgttttcataaccctttttctccttacatattctcgtgaatccagaaacaaaaaatataaccatataccatgattacgatcctgtctcttccattcccttcttcactttagtgtaacaaaaaatctatctgatttccatatttttgtggcattttagcaaaaaaatactgctgcccgaacttttatcaatgtttcgaacagcagtatctgctatatctctgaattattataatttcttacctgtaagcatttcataaccctgaagatattttccaattgtcttatccacaatgtcctgcggaagtgtccagtcattgtccggatttgctttcagccagtcacgtgcaaactgtttgtcaaaggatggctggccatgtcccggttcgtatccttcagcaggccagaaacgggagctgtccggtgtgagcatctcatcaccgatcaccatgtttccgtctttatccaggccaaattcaaatttggtatctgcgataatgattcccttgcttaatgcgtattctgcacatttcttataaagtgcaattgtattatcacgaagttttgcagctaattcctctcctcttcccgggaaatatttctcaaggtgagcgatactctgctcataggagatattttcatcatgatcgccaatctcagcctttgtggacggagtatagatcggctcaggaagcttgtcagattccttcagtccttccggtaattcaatgccgcagactttacctgtcttcttgtagctttcccagccgcttcctgtaatatatccacgaacaatacactcgataggcagcatttcaagcttacggcacatcatgctgtttccgtcaaatttctcctgctggaaaaattcaggcatgtcttttacatctacagaaatcatgtggttcggcagaatgtcttctgtcatgtcaaaccagaacttggacatctgagtcagtacagttcccttcttggttacctgattgttcaggataacatcaaagcagctgatgcggtctgtcgcaaccatgatcaggctgtcaccgttgtcataaatctcacgtactttaccttctttgattggtttcatttcctgcattttttcgcacctcaatattcgttatgtaatttgtaaaactccaaaatcatcggcctttgccgaaattactgtattaccgtaccactatctctgtaagattgtcaatacactgaattttatttagctttgctgataaaatgtaagcaaatatgaattccatttcatatcctgaaatggctttattcatccttcgcccatccgtaagaatatttcacagctttattccatcctttaatcttttgctctcttgtttcttcggtgatagacggatagaatttctggtcaatggaccaattgttgcgcacttcttctttactgctccagtagcctactgccagacctgccagataagcagcccccattgcagttgtctcaacacagcatggacggttgaccggtgcattgataatatctgcctgtgtctgcatcaggaaattgttggcactggctccgccatcaacttttaatgccgccagattaatgcctgaatctgctttcatggcatttagtacgtcatttacctgataggcaatagattccagcgttgcgcggataatatgatatttgttcacaccgcgggtaattcctacgatcgtacctctcgcatactgatcccagtggggagctcccagtcctgtaaaggccggcacaacataacatccatgcgtatctgatactttatttgccatatactcggaatcttcagaggaatcaattacctttaattcatctcgcagccactggatagctgcacctgcaacaaaaattgatccttccaatgcataggttacctttccgtccaatccccatgcaatcgtagtaaccagtccgttttttgaaaagacaggtttttctcctgtattcatcagaagaaaacatcctgtgccataagtattttttgcttctccggcattaaagcaggtctggccaaacaaagcagcctgctgatcacctgctgcacctgcaatagggatagcaccgccaaggactgccggatctgcttttccataaatacagctggatggcattggtttgggaagcatggactttggaatgtcaagttcattcagaatttcctgatcccactgtaaagtattgatattaaaaagcatggttctggatgcattggaataatctgtaacatggactctgccctttgtcagtttccagatcagccaggtttccacagttccaaacaaaagctgccctttctgcgctttctctctggctccttctacattgtccagaatccactttatttttgtcgcagagaaataagcatcgatcacaagccctgttttctccctgaatttctcagtcagtcctctggctttcagcgagtcgcagtattccgatgttctgcggcactgccatacgatcgcatgatagacaggtacgccggtatttttatcccacacgatagcagtttctctctggtttgtgattccgatcgcagcgatctttgaagcatctgctccgatcttggtcattgcctctactgccacacccagcatactggcccatatctcatctgcatcatgttctacccagcccggtttcgggaaatactgggtaaattctctctgtgcaacacttaaacgttctcccttttcattaaacaggatacagcggttgctggtcgtcccggcatccagtgccataatatattttcccataaaagaattcctccgttctctttcattattataaccataccacaaacatctgaaggttgctattcttttttattcatgttatgatgcagacaagttactgttcacacattgctatcctacgaggtgtctcggtatgaatatgccgaactcctgagacatacaggcaaaaatcccattacttcaggcaatctggaatgaaatttggctatgttactattaaacgaaggacggaataatatcttgaagaaaaaagaattcatttttataggtggtatccttattcttgcacttgcgatgtggggaggaatgtctcttataaataagggcagtcatggttccatccgcattactgtagacggaaaagaatatggaacttattctctggaaaaggatcagacgattaaaatcaacgatacaaatgtctgtgagatcaaagacggtcaggcacgtatgatctctgcacaatgccccgatcatctgtgtatgaaacagaaggcaatcgacgaaaaaggaggcaccatcgtatgcctccctaataaagtcgttattgaaggggaaaaaagtactgacagtaaaaaaactgacgaaccggtaattgatgcagtaacctgagctctccgttgcctgtaactgaataactgtttcacagttcggctaaaagcaaaatttaaaggcatcatattatacggcagctatatgatgatacacaccagcccgcccttactgtcattgacaattttctgcatggtatcctgaagctttacctggctttcttcgctgatagctgcaatcttgcttcggatgccatcctgtactagctgctcaatggatttgccgaaaatattagtctcccagatactctcccccctctggctgccttcgtcaatatactggatcagatcttttgcctgctgttctgttcctactatgggagcaatttcagtttctatatttgcctttatcatatggatagacggactctttgattttatctttactccatatttattcccctgtcggatcacttcaggctgtgcgatctcaatctcatccagattcgggacaaccacaccataaccggttccacgcactgcttccagtgcagtctgcacttttacatattcctctttcatatgtaccagttcctgcattgtatggatcagttcatattcactctccatttcgattccactcatctgactgagcatcctgtaataatattcttcctttatgcgtattcttacctttactgttccatcggataagcctacatcttccagaagggaatcctgtacataaggtccggataattttacagattcctttgtgatatcacgtatatgctgcatacttttcattttatccctgatctgtgaaaggatctgctgttttaactcatgctccaggggaagcatttctacccagcacggaataaaaaactgaatctgactgacaggaaattcatataaaaccttctccagaatcctggcaatatcttcttttctcaattggtcacagtttactgtcagagcagttaccttatatttctgttggatttcttccgctgttttcagagccgcatctttatatggcatctgcgaatttaccagcacgataaatggtttctgctgttttttcagttcctgaatagtcttctcttctgcctccggaaaattgtctctgggaagttcaccgaaacttccgtcagttgtgaccacaatacctattgtggaatgctcctgaattactttctgtgttccgatgcgtgcggcctcgcgaaatgggattgcctgctcaaaccagggagtttttaccattcgttctttcccgtcctccgtctgcccggatgcaccctttaccagaaaacccacactgtcgatcaggcggatctttacctgctgatcttctccgagagtgatgggaactgcttctttgggaataaattttgtttctgctgtggtaatgattttgcctgatccgcttaaaggaagctgatctctgatctctgcctgctttgtatctgacatctgcggcaatgcaacaagttccatgaatctgcggataaatgtagattttcctgtgcggacaggtcctacgacccctatgtatatatctccccctgtacgggcctggatatcacgatacacctgaaaattttccataaaaatagcccccttgcatatttacacataaccttcatgtattgttataaaatatgcaaggaagctttaaaatattctatttatcatttggacatattgttactgtcaggtatcacagatgttccttaataggaatcattgtgaagcagatgatgctctttgcctttcagaagtccgttgtaaagttccagaactaacgggttttcatcagatttcttaatgatagttgtattatctgcattatacaggcccttagctctcagagctttggttctgtcgccggatcttgtcggctgcccgccacccatgatacatccgcggcggcatgccatgatctcgatcagatgatattctttctcaccattcttaacctgttccataacggttcttgcatttgcaaggccgctggcaacacagatattaaggttcattccttcataaggaactgtaaattccttgattccctcatctccacgaacaccgcattctgcgatctcatgcatggtttctttgctgtgatccggagtcaggcggcggagaactgcttctgtaacacctcctgtaacaccgaagataacaccaccaccggagccgaagccaaacggcatatcacaggcttccggatcaagagttgcaaagtcaagaccaaagttatcgatcatgcggagcagctctgtagttgtaataacgatatctgtatcctgttcaccgtctgtgaagctgttcggacgaactgcttctgccttcttggctgtacatggcataatagaaatcataactgttttcttgccgccggcatgttccggatcgcggaagtactctttgattactgctgagagcattccctgtggagaacggcaggtagaaagattaggaatatactccttgtactggtctgtgataaacttcacccatgcaggacagcaggaagtaagaagcggaagtttctcacccttcttaattctgtcaaggaactcggcactctcttccataatagtaaggtcagcactgaatgaagtatcataaacttcatcgaatcccattctgtggagagcattgacaatcttacccataacactcttgcctttggtcagtccataatgatcacctactgcgacacgtactgcaggagcaatctgagcaactacacgtatattcggatcagcaagtgcttcccatgcctcgtccatatgtgtcttgatcgcaatcgcacctgttgggcaatatacacgacactgaccgcagtttacacattctgtctctgcgatttttttgttaaatgcaggcattaccatggcctcagttccccggaatgcaaatcctaaagctccgattccctgaagttcttcgcaggcacgtacgcagttaccacacagaatacatttgtttggatcacgaaccagagaaggagaacttgtatccaactcatgatattccctggtatttttgaaacggattgtctgtacgcccagcctgtgtgccagttcctgaaggacacactcaccactcttaacacaggttgtacagtcacgacaatgtgctgcaagcaataattctacaattagttttctgtatttcttgactcttccggaattggtatagatcaccattccatctcttggctgttcagaacatgaggcaaatgtttttcccctctcgtcttcaactgtacataaacgacaggcaccaaaagtggatacctctgagtggtagcacagtgtcggaatattgatccctgccttgcggatgacagacaggacatttttttcatcggtaaattctacctttctaccgtcaattatcatatggcccatagtgtatcctcccttctatgcttccacatatactgcatcaaagttacagttgtccttacatgcaccgcatttgatacagatgtcgttatcaatgtgatatggatgtttgatcttacctgatatcgcacctgccggacagttctttgcacatttaccgcagccgatacagaactcagggttgatgtggaactgacgaagagcagtacatacttttgcacggcatttcttatcgcggatatgttcctcatattcattgcggaagcgtttgagagtactgataacaggaagaggtgcactcttgccaagtccgcacagagccatgttctgaaccatatttgcaagctcttccagctcatccagatcggacatctcacccttgccatctacgatcctctccaggatctccagcatacgtttggtaccctcacggcacggtacacatttaccgcagctctcacgctgggtgaagttcataaagaatctggcaacctcaaccatacaggtattctcgtccataactaccagaccaccagatcccataatcgcatctaattttttgacagaatcaaaatcaagaggtgcatccagctggtcaaggatcagacatccgccggacggaccgccgatctggacacctttaaatgcggcgccactctttaaaccaccaccgatatcatagataatgtggcggagtgtggttcccataggaacctcgatcagaccggtattctcgatagaaccggtcagtgagaaggtttttgttccggggcttccctctgtaccgatggtgcggaaccagtctgctccctgaagaatgatcttcggtacattggcataagtttctacattattaagaactgtaggtttaccccacagacctttttctactgtacggggcggttttacacgaggcatacctctgttaccctcgatagatgcggtaagtgccgaaccttctccacatacgaaagctccggcacctctgttgatatgtaaatggaagtttacaccggaatttaaaatattatcacctaacaggccatatttttctgcctgttcaatcgccatcctaagtctctttacagaaagaggatactctgcacgaacataaatatatccattctccgcaccgactgcgtaggctgcaatagtcataccttcgatcatcttatatggatcaccttccatgacggaaccatccataaatgcaccaggatcaccctcatcaccattacatacaacatagcgggttttctctgcctggcgtgcaacctgagaccatttcttgcctgccgggaatcctgcaccgccacgaccgcgaagcccggatttagttacttcatcaataacttcctgtggggacatgcttcccatcacttttgcaagtgcctgatagcctcccacagcaatatactcttcgatagattccgcatcgatttttccacagttttcaagaacgatacgtgtctgttgatttaagaaaggaatatcatcaggatgtggacagactgtattattatctcgataaaacagcctctctacaggttttccttccaatatagttctctccacaatttccttacagtcttccggctgtacgtgaacatactgataatcatatggttcaattctcatcagaggtccaagttcacataagccctggcaccctgtcttgatcacgcctacatgaggcacatccttctgcatttcaactgttactccatcaattctctcacagagtactgacatctcttcataaatcttctgcgctccggatgcgatacatccggtacctgaacagacaagaacgcggcaggtataagatttaatctgctcatttacttcagcctgcttatttaacaggtcttctttactcttaatactcatacgcactctcctctcagtttattcaaaagttctacagctttttcaggagtcatcttcggatgtacttcatcattgacagtcagtgtgggggcaagtccacatgcacccagacaggatactgtttctacggtaaaaagcatgtcatctgtagtgtgtttcttgttgctcagtccaagttccttcatcaaagcctcttttacaggcatggattttctcacatgacaggctgttccgtcacacactttaatgacatatttccctttcggctcaaaagaaaaattctcatagaatgtggctacactgtaggccttggcttcttttactccgatttctttcgctacataagtcagcaattctcccggcaggtaacgatattccgcctgaatatcctgcatgatcggaatcagcgatgctgctgtacgtccgtagtgctcgatgatctcatccgcttttctgtaataagactggtctaacattcggttccctccttaaatagtaattttgatacattggttttaatatagtaccgatatatcgattcccacgcagctttagttattttcaacatatgtgctgttgatattatacattatatggttgttttgcacaatatcatttttgaaattttctgaaattaatttataacaatttgttatagatgtatagtattcataaatgtatataaatgaaaagcaatttctttaacagggttgttaatttaatagcaatatcaaaacaaaaaaagatcattgaaaagaatattatcttcttctcaatgacctttctggaaatggctgcattatttaatttcatgttcctcatggaaatgcttatatttttctataaacatcaacagaaagctgatcataaggaatccacaggaaacccagatcattctgattccatagcgtatggacagatttccaccaatgccggcacccaaggcaaacataaggatgattccaaaataatacatcgcctgttttagctgttttgattttttttcacgaaaataaactgacaacgcagctgtaccactgcgcaaattaccgatacacatagtacttgcataggaatatccgtttaccttgcggaaggactgtacctgcattgcacaggcgaaagatgccatggcatttgccagcatattgtattcggttggcaggaaacctactgtaaataagatcaggatttctgccagcagaacaccctgtctccagtggagcttctgcgcatatttataatttgcctgtattttctccgcaacccatacgcccagtgcaaagaaaataataggaaagaagtatcccagtcctgctgtcagttctcctgccataaagtgctggctcataagaacgacgtttcctgtctgtgcattacagaatacttcgtttcttgcattataggtgtaagcatcctgaaaacctcctgacagtgccaggaatgcactgtttaaaaaggcttccgacatttgtatttcgtgttgattatgatctttcatgattttccccgttcaagtttatttgcagttatctcctgtacggataactgcctttattcttttaccgtttattttcaaacattcgaaatccgctgctttactgcgtaaatcgctgctttctcatgtttggcgggttcctttttgaccctgattatcatgttatacgtttataggtcaaatgtaaaagatataattcatattattgcatatatgatttttatatattggatacaatatatatataattttggctatataaagcaacttccatatactgtatgtctacagcatatggaagttatttttttatgtatctgcagaattacttatctccgtgttctttgagatattctgcttttcccatctcatacagattattgccttctgagtcaatgatgactacaagaggcatatcctctacatacaatttacgaagtgcttctgctcccagatcttcatatgcgatcagttcagctttcttgatgcattttgcaagaagcgcacctgcaccgccgatagctccgaagtatacaccatcatatttcttcatggcgtctactacttccggaaggcgggcacctttaccgatcattcctcttgctcccacagacatcattgtgggtgcataggcatccatacgtccgctggttgtaggacctgcagagccgatgactgcgcctggttttgcaggagttggtcctacatagtagatggttgcatctgtaggatcaaatggaattttttccccttttgcaagggcctcacacattctcttgtgtcctgcatcacgggatgtataaatagtacctgttaataatacctgatcacctgcatggagagttcttgccagctctctagtaagtggaagtgtaattttctttctttccatctcagatcacctccgatttatggcgggttacatggcagttgatattaactgcacatggcatacctgcaatatgagtcggcattgtttcgatattcaggccgatagctgttgtctttccgccaaatccctgcggtccgattccaagtttgtttactttctcaagcatttctttctcaaggtctgcataaaatggatccggattctgggaatccagtggtctcatcaatgctttctttgcaagaagcgcacatttatcaaatgtaccgccgataccaacgccaactaccattggagggcatgggttaggacctgctgtctctactacttcaaggataaagtccttgattccctgcaatcctgcggatggtttgaacatacggatctgactcatgttctcacttccgaaacctttcggtcctactgtgatcttaactttatcgccaggaacgatttctgtgtaaatcatagccggtgtattgtcccctgtgtttccacggcgtaccgggtcttttactacagattttcttaaatatcctttgtcgtatccgcggcgtacaccttcattgatcgcatcggtgagatctccgccaacaaaatgtacatcctgtcctatttcaaggaatacacatgccattcctgtatcctggcagatcggcacgttctcgttatctgcaatatcaaaattctcaataatattgtcaaggatacccttggcaatctctccgtcttcgcatgcgcggcatgttttgatcgcacattttacgtcttccggaagatgttcatttgcttcgatacagagtttttcgatgacatctgtaagtctgcttacttctacttcacgcattctggtaagctcccttctttcatttggggatattcaccgggaggtgacatatcccttttgcattatatcaaaggctcccggtaccggtaatcccttatcgataccgggagctcttttttacattctgagtatcttattagcgctgttcgtgacgagcgtattttggaagcagtaatggagataccttatcagtatgtacgcctgctttatccagttcttctgcatatttgtaaatatggtcgaggttcatttcaccaagctctacgttcttgcattttgcagctgcttttttaccggcatttcttccaaatacgattacatccagaagagagttacccatcagtctgtttcttccgtggattccacctgcggcttctcctgcaactaacaggtttggaatttcttttgtgaatccgtctccgttaatctcaagaccaccgttctggtagtgaagtgtcggataaataacgataggaacttttctcatatcaatgccgtagttcatgtacatacggaacatagccgggattctcttttcgatggttccttcgccaccgaggatctcgatcatcggagtgtcaagccatacacctttcagtccgcctggaacttctacgccgcggccttcttcgcattcacggataacaccggaagcatttacgtcacgggtttcaagcggatgaatataagcttctccgtttgcatttacaagctgtgcaccaacggaacgaactttttctgttaccagagcacccatgatctgtgatggatagattgctcctgttggatggtactggatagaatcctgataaagaagggaagcaccagctctatatccaagtacaagtccgtctgcagttgcgccataatggttagatgtcgggaatccctgataatgcattcttcctgcaccacctgttgcgattacaacagttttggctcttgcaacagaataatctcctgtttccatgttaagaagaactgcacctgcaacctgtcctttttcatctttcagaagttcaacagctgaagtaaattcaactaccggaatcttaagattcagaacttcatctctgatggtacgcatgatctcagatccagaataatcctttgcagcatgcattctctttctggaagtaccgccgccgtgtgtggtaaccatggttccgtcttctgctttatcaaattcaacaccaaggtcattgagccatttgatggcatccggagcttccattaccagtctctttaccagttccggttttgcagcaaaatgtccgccgccgaagcaatccagataatgctgtacaggagaatcgttctctttgtcagctgcctggataccaccttcagccatcattgtattggcatcaccgatacgaagctttgtaacgatcataacgtcagcacctgcattatgtgcttcgattgcacaggaagaacctgcaccgccgccgccgattacaagtacatctacatcataatcaatttttgtaaggtcaattttttcgttgatcagacggcttgttgaatgaagcatttctgccagttccagaggagctttctgtcctttgttcggtcctactttgatttctgcaaacgcgtctggattataatccggatggaatttctcaagaagagcgtctttctcttcagctgtcagacgtcttggctctgttgccatacgctgtgctcttgtagcctctacctttttgatggattccatcatattttctggatatggtgcatacatgttttacgccctccctatttctcaatttctctgttgttgtaaagttcctgcatgtctgtgattggtttctgcatgatctgctcgatcagatcatcatatttaccttcgtggatttcttctacacgtttctccagatgttcgctcttaggcgcgatatatttacctgtgagacgtcttgccagaagacctaccatcggatgggaaataccggccggacatcttacagaacagcatccgcagcttacgcagtcgaaggattcctctgcacatttttcaagttcgcctctctgtgcatatgcgatgtactgcattacatttaagtcctgagtacatgcttttgtacaggcattacatccgatacagctgtagatttccggatagagttccatcattacctgctgattcggtttcaggtcttcgatgttgtagagtctcttatctgtagggaagaacgggatgcttgctacatacattccttcctgtacctgtgtctgacaggcaagacatgttttcagctcgttttcacctttgattctgtagattgttgcgcaggctccgcagaatccgtgtctgcagccgcatcctctctttaatgtataaccggcatattccatggcagtcataattgtaagttctgcaggtacgctgtatttcttaccgaaaaaatatacgtttaccatattcttttccatttgagattaccagtcctttctatatatatcatctgtcgtcagcagcacatacaagctcgaatccgctacgctacttctcgcttgagggcgttcgccctacagaatgttctgtaaaagaatgcttatatgcaagcatgacgcattccttcacatcactttctgcactgctcattgcttatcaatattctgcaggtaattcatcaatctcgtcgcatctgaataccggaccgtctttgcagacgtatttggaaccgatattgcaacggccgcatttaccgataccgcatttcatacgaagctccagagttgtgtaaacctgttctctggagaagcccagttcttccagtcctgcaagaacgaacttgatcatgatcggcggtccgcagacaagtgctgttttgtttgtatcgaatccaatctctttcagataagaaggaacgaatccaacgtgtccgtcccagccttcctgttcacggtcgattgtcagataaacattaactccctctgctttcatccagacttcctggatttcttttaactgtaccaggtcatctgcggaacgggaaccatagaggatatctactgttccgtaatctgcacggttatccagtacatagttgataacagaacgaagaggtgcaagtccgataccacctgcgataaacagaaggtttttaccttttaatttatcttctacagggaaatgatttccgtatggtccacggactgtgatctcatctccaacctgaaggctgtggagataatcggtcagtgcaccgcacttcttgatactgaattcctgatattctttatttgtaggtgaagaagtaatggaaaacataccttcacttacacctggtgcgcagaccattgcacactggccaggcatatgttcaaaaagttttcctccttcaggagcgtttacacggaatgttttaacatccggtgtctcctgacggatatctgtgatcacaccaaccttcgggatcagtgtgtctaatgtgtagtttttatggcaggtacattcgctcattatttttcacctccctgattttcaaaagctttgatgacttttacgatatttaaggatgatgggcatttctcaacgcagcggccgcatcctacacatgagaacattccattgttgtttaccggatagtaaacaagtttatgcatgaatctctgacggaaacgctgcatctggctgttacggttatttccgtgtgccatcattgtaaagtcagagtacatacaggaatcccagcagcggtaacgctgtacgccgtgtcctgtgtcataatctttgatatcatagcactggcaggtagggcatacgaatgtacaggtaccacatgccagacatggtttgtaaagttcttcccatacaggagagttaaaacggtccatgtaatcttcctgtccccatccttccagagaaagattagaataaggaagtttttctacgatggcgcggattgcagttttctcttcttctacctttgcttcatccgcatcgttaagaagttctgcaactgcttttgtaagagcttcgcccttctctgtaagaggtttccagtaaagctcgccttcgatcatccatgctgcaacatctgcaacaggatctgcacagtcaatgccaaataccttacagaaacagctctcttccggttcatgacatgcaagtgcaacgatggttccatgctctcttcttgctgcatagaaggtatctaccgggtcacttaaaaatacgttatccagaacttttacaccctgtacatcgcaggctttcataccgaatacaacaaagtttttctcctgtaatgcctgtggttcgatggtaatgttctttccttctttttcgcaggtataaaggttttcactctgtggaaagaaagcatcttttggtgactttacggtttttaaagtgtcaagacagacttctgcgtcctggctccatgctctgaagtttacctgatcactgactttgacaggtaaatataaatcctgatctgcggcaattttctggaataatgcctgcagattctctgctgctatcttatacatacattatcccctttctgccacgatactcggctcaacatcttcaaatgtaaagtttgtaagaggtcccttggatgttgaatcctctcctgcctgatattcaccatagaatgtatcaatatctttgataaatttacgattgaacaggtgaagcggaattccctgaggacatactctgctgcattcgccgcagtctgtacatcttcctgccacatggaatgcacggatgatatggaacatcttctcttcgaaagagtccacgtttgctttctgcgcactgtcaaacttattgctgtcgaatacacatttacggcagctgcatgcaggacagacattacggcaggcattgcagcggatacatttgcttaactggctctggaagaatgcaaatttttcttccgggctcattgcttcgatcttctctacttctgcaaaacgatctgcatcttttgtgtctttggactcaccgataagttcatcataaatcttatgttcttttcctttacatacgtgacatctttcaagcattgcatctttgtatgcacaggtcttctcaccatagattgtctgaatagtcagtgtttctgcctcatctgtgatctctgcaccggaaatgctttcgatacctttgattccctgtttgcggattctctcgatatccagttttcctttacatccaacaccaatgatataagctttctcacggtctacacgatgctctttgatcagctgattaaagctgtatgtatcacatggttttaaacaaaccagtgtcttgccttccagtttggaagcttcgatcatatatttgcttaagtttgcaccgcagaatccgttatatacaaaatctttcagagattcttctgtttcaaagtaagccggttccggattataaggcagatctccggctttccatcccagaactcttgcaactgtgccgtcagcaagcagttcttttgcacgatttatcagctcctgcatcttaaatcctccaatcttacgttcttaccaagtgaatggatcttctctacaaactcattcatagtctgggagaatttcacaccttcagcagcggaaacccattctactcgtgttcttccgttttccacaccgatgtagtcgagcatggagaaaagaagcgtcatacgtcttcttgcatagtagttacctgtgctgtaatgacagtctccaggatgacatccacacatgatcacaccgtcagcacctttctcaaaagcacggaggatgaacattggattgacacggcaggaacatggaacacggatgatctttacgtcagccgggtaagaaagacggctgcttcctgcaaggtctgcacctgcgtaactacaccagttacagcagaatgctacaatcttaggtctgaattcttcgtttgtttctatcgacatattgcatctacctccgcgataatctgtctgttggaaaagccctgcagatccatagcaccagacgggcaggctactgtacaagcgccgcatccctggcaaagtgctgtatttacaacggctactcttcttgtttcacggataccgtggtcatttacctgtttatcctcataggaaattgctccatatgggcagacatttgcacatgtagaacatccgttacataacagttcatcggattttgctgtacatgggttggttgtcagtttatctttggcaagaaggccgattgccttaactgctgctgcgccagcctgtgcaactgtctccggaatatctttcggtccctggcatacaccggaaaggaagatacctgctgtaggagattctacaggacggagttttgcatgggcttctgtgaggaagttgtttgtatcaatacttgctgtaagcatagtagcgatcttacgaacatccgggttcggttcaatggctgttgcaagaacgaccatatctgctttcttaaggatttgtttgttgtcaatcaggtcagatccctgtacaagaaggcttccgtccggctgtggaataacttttcctacctggcctttgatgtagtttacgccgtactgttctacggctcttctgtagaactcatcgaagttcttaccgggtgtacgcacatcaatatagaagactgttacatttgtatccggatatttatcacggatcagcattgcatgttttgctgtgtacatacagcagattttggaacagtatggctttcctctgtcatcagaacatctgcttcccacacactggataaataccagctctttcggagcctttccgtcggaaagacgctctaagtgtccttttgtaggacctgctgcgttcatgatacgttccagttccagggatgtgataacatctttactctggctgtacgcatattcatcatatttgtcaagtttgatggtatcaaaacctgtagcaactacgattgcaccgtatttctgtgttacgatctcatcctgctgatcgtaatcaatggctcctgcctgacatactttggagcagacaccacattttcctgttttaaatttcagacagttctcacggtcgataaccggaacattcgggattgcctgtgcaaatggagtgtaaatagcagttctgttatttaatcctctgttaaattcgttcggaatcttcttggacggacatttttcctggcagacaccgcagcctgtacatttgtccatatttacacttcttgctttctttctgatatcaacggtgaaatcacctacgaaaccgctgacatgttctacttcactgtatgtatagatattgatcttctcatgtgctgctgcctctaccatcttaggtgtgaggatacatgcagaacagtcaagtgtagggaatgttttatcaagctgtgacattcttccaccgatacttggagtcttctctacgatatctacttcatatcctgcatctgcgatatccagggctgtctggattccggcaataccgccgccgatgatcagggctctctttgtaacacggctctctcccggctgaagaggagcatttaaatttacttttgcaattgctgctctggcaaggatcactgctttctttgtagcctcttccatatccttgtggatccaggagcagtgttcacggatatttgcgatctccaccatgtatgggttcagaccagctctttcggctgcttttctgaatgttgcctcatgcatacgtggagagcatgaacagacaacgacgcctgtcagtttcttctctttgatggcttcctgaatcttagcctggcctgcttctgagcacatgtactggtagtcttctgcatgaacgacacccggctctttggcagctaattcaacaactttttttacatctaccgtagcggcgatattacttccgcaatgacagacaaatacaccaattctctgcacgctggcttacctcctgtatcttctgaatgcacttaccagaagctgctgtggcagttccggatcaagaagctgtggtatctcatctgctttcagataatcgccgcctttttcacggacaactaactgtcttgctgcatcgatgatctttcccggttttacatctcttggacaacgctctacgcaggcaaagcaggaaaggcatttccagagagattttgaattgacaagtgcttcgatatcttcatttacaacataggatacaaactgatgtggcttgatatccatttcattgaaagatgggcaggtagcagaacattttccacatttcatacatttcagcggattggttccggagatctctttgatcttttctgctgctgaatgctggtttctcattttgccacctcctcttttactccgagggcttctgcaaggagctctgtgaaataatatacaggcagttcgctggaagcgtttttatttaaattatatttacacaatggacaggctgtgatcagcatatctgcgccaaagcctttcgcactgtcttcgattttctgacacatgttctgagacatatctttttctttcagagaaatgtaaccgccgcagcattcatttctgtatggatagattaccggttctgccccaagtgcacggatgaaatcttccatgattgtcggattctctggatcatcaaaagccatgatcttgcccggacgtaataagagacatccgtaataagctccgattttctttcctgtaagcgggtttactaccttctctttcagcttgtcgaaaccgactttgtcgcgaagtacttccagataatggagcactgttgtctcgcctgcatatggctcgtcaagctgcatgtaattgttcgctctggtgcggatatcttccacatttttcatatcatcattgacacgtttgatcacgtgatgacaggcagagcagattgttaccagatcctggcccttttctttggcctgattaagagcacgtacagaagaaagcttcgtagcaatttcgtcagttcccagaggataaacacctccgcaacactgccagtcttcgatctcttccagttcaaacccaagtgctctggcgctggctctggcatattcgtccagatctttcgccttgtttctcagggtacaacccggataataactgtacttcatacttaacattatcctttcttagttgttcagataaattcatgttgctcaaataatgatatcagggtccaaaagcaatttgccccgatatatagcgcccgtaaataacagtcgctagtccttgtcttttttttaacaatatatggacaaaaatataaatcaagtctaatacaattactttttatatctttgttgagacatagaaaataaaagagttcgcacacccttcctccgcaattaaaggagtgtatcagctcgatttccgaaaaatattatatcatattgacaacattttaacaagaggtttttgataatttttttatcacgcatcattgctcaattcttctgatctaaattaatctttttcaggcagataaaatcttccgcttttctatttactcacaatcatagtatctttcaaaaaattaataaaaatattatttatatatttttttgcttttgatatatgtaagccaaaattcgtctgtttccgcttacagtacagaattttggctaataattaaaaaggagtaaacagtaatatggattcagaagaacaggctgtacctgtacttctgaacgttttgtctgatatattattaattaaggtcaatctgagcaataatttctttcagtgcatctgcactcttcttaagctgttcgatctcagcttttgtcattctcattggaactttgccctgtacaccatttggtcctaccagagttaatgtactcaggcatacatcatcgattccgtactctccatgcatcatagtagatactgtagagatagactctgaagaagatacaagaaggctgcaaagtttgcatacagaagaggatactgcatagaaagttgcacctttcttggaaatgatctcaccgccagatttctgtacatactgaagcattgcttctttatcaatcggttcaatatccttaccgagtttcttctcaaggtcgtaatattcatccacacttacacctgaaatataggcaccagaccacggaataaaggatgtatctccatgctcaccgaatacataggcatggatattactctgtgcaatctggaaatgttcggataatccgcagcgcagacgtgcagagtcaagaattgtaccggaaccaaggatctggttttctggaagtccggaaatctttgtaaatacataagtcatgatatcaaccggattgcttacgatcagataaagggcatttggagctgcctttacgatctccggtgtgatagatttgaggatatttacatttgtctgtgtaagttcaagtcttgtctgtcctggtttacgggcaataccggatgtgatgataacgatgtcagaatccctagcatcttcgtagtctccggcaatgatagagataggatctctgaagcaggttccctggataatatccagaacttcaccttctgctttctttttgttgatatcgatcagaacaatttcagatgcgatatcctggcttgataaagtgtacgcgatggtagatccgacgctgccggctccaatgatagtaattttactgctcataatcttaatactccttttctcctaacaaaattgacgtcttaatgataacacattgtcaaaaaattgacaagagcttttgtacagaaatctgaacaattttttcgtttaaatatttgtttggaagcataaaattgtttgttagtttgatataattttcacattttcctattggagtagatacttgcacgaacaaatccccaaccactgcttattgctttttgcaatttaagcagtggttggggattgccctgatttttgattcggttaagtacagtatctgaaagctttatctgtcagaatacgtgcaaagattagccctaatggcaacgctgcaatgataaggatcgcagacgcaaaccaggatgcagctactgataatgacataataccaagattataaaatcctctgtataaatataatcccggaaccatgataacgattgagggaactgttacagatatccttggatatccgactttattcttcagcagggacgccagaagtcccgcagtaagtgcaccaataaatgcggctgcagcaggaggaatatttgcaaggtctaccagttccagtctcagagtattggcaactgctcctatcccggctgctgcgactgccagacgaaccgggctgttaaacatgatagagaatccaaacactccgcagaaacttgcaagaagcctgaataagatccactgctctgttgacagtgaaagttttataaaatctacaggtttcaaatgcaggatcagtgccatgatccatgctgacatagtagctaccagaataacgatcaaagcataagtcagacgttctattcctgaacgcatatccagttttgcaaggtcaataccactggtaataaacggaaatcccggtatgataaagagcattgcacagatatatcccgcttcgtgctgaacagaaataccaaataatatttctccaagtttgagcagacctgcatatgcaaaacatgccagagatacagaagacacaatacataagaacaatgtaaaatggtgtttggtcagtttgcagcggagataatttccaattcctgccccgacaaatgcacagaacatctcgatcggaccgcccccaagaaggaatgtaaatccgcagcatgcgatcgctgcagcaagtcccagtgcaggcggggaatatagaccatgtgttttttcaatattgtcaagaaatgtatgcagctgttctcctgacatatgttttccttctttttcaaagtttcggataaagtgttccagacgatttaacttcaaagtatttacgcctgtattagtcaggcacaacgactgggtaaaaccattttctccgtcataacatgtatattcaatggacatcagaccaatatccgccgtacacgtaatgccaagtgcttctgccagtgtattcatggaacttctcactctccatgctccggtaccgcatgagagaaacataatccccacacgtccgataacggatgctttctctgcgatgctggaatctacaactggtacattttccccattttcatctgtatactcatgccaggcaacatccatatggttctttttaatcacttcctgcggcatttttctcacttcctcattctatattgtcaatcggataaaatcatccgctttgctacttgcttgatttgttaaagctgcagactgtcatttcctgctttctccatcattttctctctgcatgccagtacgattccgtcaatctcgtctaaatgctgcagcatttttttctcaaattcatggataggaagaagaattccaatttcatcatagggtttatccggattctctttcttcagacctgtttcctgtccgtagtatactatggctcttggggcttcttcctgaatcttctggaaagcatcccatacaacggcatatgcctgtgcttctgtcagacccagtttacaggtgtcgggaagtgcataaagagccaggacaccacgtttacggttatctttttcttctgtaatgttcagaccttctgtataggtacggacaagatcataaccatctgcaagatacagcgcagatctgggggcacattcatgatgttcatatgtttccttgaattttgcatattctctggctgaaaccttttccccgggaagaagttctccggctgcatctgtaaggagcaccgggttctctcctgcttttccgtggaatttcttcgggatcagataagcctcccttaacaggtcaaacatacttctgccgcataattccaacagcagtgcactgatatcaccgttctggtacgcatgaaacaatacctgcaggaaatgatctctgtcattatctgtcagacgatggtcgtcatctatatggtcataaaaaactccgcttaatcgtccggatgcttccggcgaagccaaaattttagaaaaaattgtttctactgcttcttctcttggcaaaactgtactcataattaacttcccctttccaatcgtgtcagattcttttttcggttttcattatagtcttgcttttagtaatgtcaacataaaaagaggggattttctgatatcaattttacatagatgcaagctaaaaattatataaaaaagacattccatccactggggtagaatgtcttttctcataacttatatgattcttttgaagttacgttctatatacacagtggaaaccatttttcgattacacaccgatgtactttttcttttttatcgtagttgatccccaccagcaaaatatctcctgtatactgctgtaatgactctggatattttcgttcttttatctgattcagagcagtttctgcgtctttgttccatttcagttcgacgagtaatgccggataatcgtctctgtacaggggcttgggtatgaaaacaaaatcagcgaagccttttcctgttggaagttcacggattggtttgaaataatattttattgcacttaagtaggcaatgctgagtacactgctcagggaattctcgttgttgtactggattacagaagtgtattctgcatgaattttctctatctgttcagcaactgtttctgcatccatttcccaggtggcctccagtagcttctcggattcctgctggaattcgatcagttcgttccatttatttcgtttggtggcagcacgaaattcctgacggatttcttcattgggaatgtaagctctctgggttctctggtcgtaggcaaggtaacccaggtggatcagcagagtcaatacatcatctttgtctgcgaagctgaccatatcattctgaaattcattcacatttacttctacagaggaaccggacagcatctctataatggatgtccgcagaccatcaaaatccatgttgatcagtggcaggattgacagataggttcctgtctgtgaccagtagctctggaatgtccgcataattgtcagatttactaacgcatttggattatatacatgataatctccaagacggtagccgtcataccatcgtttcacttctgcaaaatctatctcatattttttacacaaatcgattacttcgtcttcgttaaaaccgatatatggtgtcaatgggccggcattaagcattgtaaactgggtgaaattatttaaggcagactgggtttttaatttctttatcggtaaaattccggtcagatatgcaagtgcgatatattttgatgcctcaattcctttaaacatgtttctgagaaagtcaatatacatttcctgtgctgcctgattatgggcttcatcacgaatcagaacatcccattcatcaatgattacaataaactgttttcctaatacagtattaatgcgtgccattgctccatatatagtgctgttttccaccagattgacttcaggataagtctctcttaattcggaaacaacgatattcgtgatatatgaaattaaattctcactggaacctgctgatatacagcaccattgtacatcaaaatgaatgacatcatatttatttaaatgttcgtaaaaatccggacatttgctgatttccagtcctgaaaacattttttcagtgtcgcatcctttactgtaatatgcagtcagcatatctacagtaacagatttcccgaatctgcgcggacgactgttacatataaacctggcatttgtgcccaatactttatttgtgtattccaataatcccgttttgtctatatatacttctgaattgactgcacactgaaatgctgcagcattcggatttacaaacatacccattatctcaccctccctctttattattgatagcttttctgtcttcttatacagcatcttataacctccttaataaatatgttcaggagttcctgtcttttagaaaactcctgctagaaataaatagtgaaaattaaagcatgacttttctgaaagaacagattcatgatctgtatatgaattgagatttggctgtaactgttgaaaataccggacagttacatagatttagataattagaaaatatgcttttgtttatcatagcataccggaacttattgggcaagagacaaaaaagagtccaacgcataaacctatatgttttatgcatcagactcttttcatttttgataattattctgtcaggaaaatataattattttccacagcagtttttatatttctttccacttccgcaaggacatggatcgtttctgccgatttttttgtttgttctccggtaggcaccgttttcatcgctgtcccactggatttcacctgttttcggctgtctctgtggatattcctcatagtacggagggattccttcatagtaaactgcatatctgttataatccttcagcagcttttcgcgcagacggttgatgtccgctgtgttgttcagaagttccatataatcttttacaaatttatagctgtccgggtattcttcgcggacaacgtcaaattctttcctgatatccggccatttttccagaagtcgaagtttcacatccagctgcatgaaacgtctgaactcaggatcctcatcatccggttccatcgctctacacatttcttttgtaaaatctgataaacggttatctgtttccatgccaaacagatgaacataagaagcaaattcatcccagatttttaatgtttctttatctgaaagatgacgtctgattttttcaataattttaagaattttcttcaggtcaggagcatcctgatatttccgggataccagaatcgcacccacaacattaataagttcttcctgatattcttccagataaagagaggattcctcaataaatgattcaaaatgccggattactttttcgtaatctgtactgctctttgctgcactgctcatcataataagtccggtaaatgcattaagtgcgtcatacatgtattctttcagatttttctctgtctgatccagaagctcccacagacagttgattccttcacggaattctccgcggctctggcagtttatggagtatgtggaaagaaactcgttatcccgcacacctgcattgtaagcatctcgaaatgcagtcattgctttattgtaatagcctctgtcaaaataggaaattgccagttcctttttataatatgctttatccggaaacctttttgccagcttttccatcgtttttatagcttttcccagatttccgcaccagttctggcctctgtacagataaaataagaatccttctgcctctccgtacacagagatggcttcttctgccattttcaccatacgttttgcatcctgaacacgcattgcatcctgcagccatccaataatctttctggcatagggatcatccggcgcctctagcatcagctctttactttcatcttctttaccggaagtaatattttcataagcctctctgatctcctgaaaacgctccggatctttttccggtgaaaactggcgcactaatctgaaataagcacgtttcactgctttttcatctgcatcctccgaaagcccaagtacttcataatctttttttgccatcttattatccctccagttcgatcagctcccggatctcatctgccagatcatccgcttcttctgtattttcttccagaattgcctttttcagcagatacagaagctcctgtatctcgacaagcaattcatcttctttgtttttcttacatctggattcaaatctctctcctcgtcggatcactgttctgtactctcctgcgcaggaggactgtttccattcactgacatctgtctttttctttccggaatccataagatcaatggtcactgccatatccttatgtgtgcttactatcgtagcttttacatcaagaattccattctgattgtaggagaactccacatcaatactttcctcccccgcttttctttcagggattccctccagcataaaattgcccaggaaatgatttctgctgacctgtctggattctccctgataaacagcaatctctgttttgttctgataatcccaggaagtccaataagtctcttttttagtgaccggaatcgttgtatttctcggaatgatcgtgctcatacagtctgctgtgattccgtcccatacctgaatccccagagtataggggcagacatctgtcataatcagcgcatccgctccatccagttctccggcaatgattccggcctggattgctgctccctgtgccacactgaaatcaggatctatggcatgatccggctttttccccaaaagtgcctcaatgtctctggcaaccagcggaactctggtagaaccacctaccagaagaatatgatccagttcctctttggcaattcccgcatcctccagaactcttcgaaccggattatgagttctttttatcaggtcaccgatcagttcttcaaagaattctctggtcactgtttcctccagtgctgcaggaatcccgtttttctccgcaagcatgggaatctgcacctgcacactgtcctgagtgctcaatgcaattttacacttctctgcttcctcttttaactttgcagctgcatatacatttccctccagactgattccctgtgtcgtttcaaaccggtttctcagccatgtgatcaatgcttcgtcaaaatccttgccgcccagctggttatctcctgcactggcttttacttccagaactccctcgaacatttccaggagtgtgacatcaaaggttcccccacccaggtcatagaccaggacgtagctttcctcttccatgtggtcaagaccatagctgagtgcggctgctgtaggttcattaataatgcgttccacctgaaaacctgccagatttcccgcctctactacttctctgcgctgtctgtcatcaaaataggcaggaacagatatcacagctcttgtaatctcttctcccagatgctgtgaagcatatgtctttacatatttcaggatctcagcggaaatttcagcaggtgtgaaggtctttttgcccagtctgatctgttctcctgtgcctatttttcgtttcacttcaattactgtacgttccggtgccagaagatacgaagcctttgcctgttctcctactgtgattttccctgtttcatcaagccctactgctgacggagtaatattctgctgatcaggattggggatcatatgtacctgtccatcagtaaaaagggctgcttctgttgttgcggttccaaggtcgattcctattattttttcgctcattttggggtctcctgaaatttattttttatacacacagacctgtgccttttttattacctgtccctgatagagcagtcccggagcatatactctggaaatgataccgtcgactgtttcctgatctgtttcttcggttttaatgatatcatgtaatctgtagttgaatggttcccctacagtaccaatttcctggatctgcgccagagagccaacctgttttcgcttttgactcatcatccggaattgttcatgccatccctctttgtctgacagaaattcttctattgtgtgcagctgttcactatatatactgatcagctggcataactgtttttctctttctgatgattttttctgtagttcttttatttcatcatcagcttctttttcttcctgaagctgatccagaaaatcgtccagagtttccattttcttacgcaggaaattctgcaattctgcctgttcattctgtattctgtccagaatttctcctgtggcagaattctcctgtctgtacatatcagatgcctgtgacaggtattcctttaagatagtctggatgttttcattttctcttttctttttcagaaaaaacatatttagttcctcttaatcttttttataattcatgataacgcaatcagagaaggacgtcaatcccctcctggctattccacataaaaacggaaacctaacgttactgtgtgtgaacagtaacaacctaacttaaaataaatgcaagtcaggatagacagattgatttatatgctgatgagctgcggattatatacattgttctcgcaatgtcaatgtaaaaaatgagattttctatagcaatcctcttaaatgcattattttagaagattgctataatatcagttttgcatagatgtaagctaaaaattatataaaaaataagtgtgtgattttgatggcaaaaagacattccatccttctgacaggacaaaatgtcttttctgtaactttttgtattttctttattaattaaaaattaaaaatcaacctctgttccataataagtgcatgtaagaagtttctccatatttgcaggatcaattgctcttgggttagagcctgtgcatgcatcaccaactgcaagttctgcaattttggcaactttttctttaaattcttcttcctggattccaaagtctttcagtgtttttggaatattcaaccttacattaaactcgtcaatcttctcgcagagactattgatcagagcctgctggcaggttccttccagtcccattcttcttgcaatctcagcataacgttctgctgctgcaggattttttgcattgtatctgatcacataaggaagataaattgcatttgcacatccatggggaatatgtccagtggagaatgctgcacctgtcttatgtgccatagaatgaacaataccaagcagagcattggaaaatgccattcctgccagacactgtgcatagtgcatctgctcacgtgctgccatgttcttattataagatgccggcagatatgccagaaccatctcaatggcctgcagtgcaagcggatctgtatatggacagtggagtgtagaaacatatgcttcaattgcatgtgttaatgcatccatacctgtatatgctacctgttttaccggaagtccctcaaccagttccggatcaacaattgctacatccggagtgatattaaaatctgccagaggatatttaattcctgtattatagtctgtgattactgaaaaagctgtaacttctgtagctgttcctgatgtagacggaattgctgcaaattttgctttctgtcgtaattcaggaaaaccaaatggtgtgataagatcttcaaattttgtattcggatattcatagaatgcccacattgctttcgctgcatcaattggggatccaccgcccatagctacgatccagtccggctggaattcctgcattacttttgcgcctttcattacagtttctactgatggatcaggttccacaccttcgatcagctgaacttccattccgccttcttttaaataattaattgccttatccaaaaatccctgacgtttcattgagccgccgcccacaacaagaactgctttcgttccttttaaattctttaattcttcgaggcatccttttccatgataaatgtctcttggtaatgtaaatcttgccattgctgttatctcctttataaattatgtctgtttacatgttactgcagaaggcactcatctcttctgttcgcttgcattatatcattgttaaatttataacgcaatagttttttatatgtttttgtattttagtatattttatgctactgttcacacactactatcccgagacatataagcaaaattctattgccgcaggcaatctggaatgaattttggctacgttaccgtgaacggaatgaacagtaactattttattatttattcctctattatttactgcttttctatatatatttattgtttggtattatttttcttatattttttgttattaatttaacattctataccagacttctatagcaattccatagaataatgcagtcaagacagttcagcagagtgctgaggacgtgcaatccaaataagtccctatacctgataactgattggctccttgtcctgatcagatgcctgataagaaatataacagtactgatcatctgaactgactacttgcagattcatatctgtcatggagatgtctgctgagtcaaaatcatcaagctttgttttctcaagaaccatctcattatggcatctctggacaatttacaaaggatttctgatatcaaaatattcattcgactatattccggactgccataatttcataccatttctgcaattatgtgtatgtctggacaaatccggaatgcacaaagaagcttttgaattttaccggaaagccagaacactgaaaccggaacatccttctgttattcaaaatcagatctattttatgagattctggggttttgaaaaaaaatgccacagaccgtattaatcctttacagtctgtggcattacgctacatattatattgttttcgttactggtgaaccggcactattccacagttacactcttagccagatttctcggcttatctacatccaggcctttggctacgctgacatagtagccaagcagctgcaaaggaataactgccagtgaagttgcaaagtgtggatctgttttcggaatataaactgtgaaatctgcagtatcttctatattataatgtccatatgtggtgagtcccatcaggtatgcaccgcggctcttacattctaccatattggagactgttttctcatagagatgattctgcgtgagaataccgatcacaagagttccgtcctcaatcagagagattgtgccatgtttcagttctccggccgcataagcttctgtgtgtacataactgacttctttcatcttcaggctgccttccatactgatggcatagtcaataccacgcccgataaagaaagcatccctggcatttgcctgcttagccgcaaaccactggatacgctctttgtcatcttcaatgatcttggcaatcttatccggaagtgttttcagctctgcgatcagctcctgatatttttcttctgtaatctgttctctgacttttccaaactgcactgccagtgcataggaggcaatcagctgagtactgtatgccttggtagttgctacagaaatttccggtcccgccagagtgtaaaaaacattatccgcttctctggcaatggaagaacctaccacattgacaattcccagtgtacggatacctctctgtttcgcctcacgaagtgccgcaaggctgtctgctgtttcccctgactggctgacaatgaccacaagaccttccggatctaaaatcggatttctgtatcggaattccgatgccagttccacacgtaccggaatccttgtcagatcttcgatcacatactgggctgccattcccacatggtaagcagagccacaggctacaatatagatctggctgatctttttgatctcctcatctgtaagacctacttctgagagatcaatacgatcatctttgagtacagaattcaaagtatcctgaactgctttcggctgttcatgaatttcttttatcatgaaatgttcaaatcccgctttctccgccgcttctgcatcccattcaattgttttcggctctttctggatttcatcaccatccagattgtagaacgtgatctccccttttctgatacgagccatctccagatttccaatataatatacatttctggtgtattttaaaattgcaggaacatcggatgcaatgtaagattcaccgttctccaccccaaggatcatcgggctgtcttttcttgccacataaatctctcccgggtagtctttaaacatgatcgcaagagcataggaaccacggatacggaccattgcatggttaatggcatctaccggtgttccgagatatttcttataataataatctaccagtttaactgctacttcagtgtctgtagatgaataaaactcatagccattgcggatcagtttgtctttcagttcctgataattctcaatgattccattatgaactgctactacgttaccgtcatcactcatatggggatgcgcatttgtctcagatggttctccatgtgtcgcccaacgggtatgtccgataccacatgttccaggtacagattctccattattagttttatctgcaagaactttcagtctgcctttcgctttaataacctctgtatcaccttcgccgtcgcgaactgcaagtcccgctgaatcataacctctgtattcaagtctggacagaccatataataatataggtgctgcctgatgattacctgtaaatccaacaattccacacatttatatttattcctcccatattttccagatatttacagcattataaaaatactgctttattatattataagagcattatggagtaatttcttataatataataaaatttcaggggttctctctgtcatatcgtgtctcattgtatcatgatgttccacatatggcaagaaaatcccctgaaactgtgtactctgtttttacgaaagtactttcattgttttatccatgttatcctttgtgtctttttctgattaccgatttcattttactttctgcttctttactgttgaccagccgctgtatatctttcttccattctcatcatatctgtatgaacggattctgtaataatatgtatgtccttttttcagttttgcatttgtgtattttgtagttgaacctgatttaattaccgctgctcttacgtatggattagtggttcctgcccggcgatagatctcatatccgtctgcactctttgcctttttccatgtaatcacaagttttccggcggtcctgtttgatatacctgtaattgaagtttttgccggttttgcagtcagatcatcagcagaatacgtttccttcgtcatataaagaatggaattttttccggttccatataagctctttgcttctttgtcatatgcaaaatatatattcgcactgtctgtcgcatatgtatagccccgggaaatacttcctgaaatcggagtatccagaaacagacctccgtcttctccaactgttccttcatcgctgtttgtgatatctgccatataatatttaccgttatttgccacaatattccacatatgaggaccttcacctgtaccgccattcatcataccggtcactgtatagcaggtaatgtcactgagatcgcacagatactgaaatgccttggaataaccttcacagaccacattagtactgtcatctccgtcaaaaacatagattaactgccatggatctccgtattcatcatcctccgtcacatcatcattgtaggaagtcaggtagcagatcatttctttatatccgtacagcttttctgtctctgtataaccctgaaattcttttacgatcattctggcattttctgctgcactttttgcaagctgtacaatccctgcatttactttatatttaccggaagcataactgctgatcaccggcatagatatggaaagattttcaatttttacagttgttttgtttcctgttgcctttgtgctgtaaccatactgccaggtagtagctgcagtcttttcgtaccagtacaattcatatggacaatctacagccaggcaatcgataatctttgaaatatccagttcattaaggtgtgcggctacttctcttttgagcgcattaccgcttgctgttgtctgccaggtcagtcccagatctgaactgactttaaacctggtagaaccacctttcgctgccactgcgctgattttactcttaagttcctcatataaggtctgctgctgtccattcagtacatcctcacccagagaagctgctggctgtgtgtccggatcctgtccgtacagaatgtcattcagatatttctccagaagctgtctgttatccacagcaccgttttcgtccggaattacagcctctgcaaagacttcttcgtctgaatctgcttcatttgaacctgctttgtccgaaatgctatcctctgtatctgatgcaaactccgcattatccgcagtttcctgttgtacatcaaattctgttgcatcatctgaattaaattcagaaactgtaccatctgtgaaatctgctgctgttacaggtgttaccgtaattcctgctgccagaaccaggctcattcctagacttataaaatttttctttctgtacataacgcattttctccttatctgtcgtaaatatagtatattactacaatactttatttcgacagataaaacaagattttttttataatccttgttctcccgccagatagcacaggtctgcaagacgttcatattttgtctgcatacacgcaatatagtcatccagaaatctttttacacgatacgggatatctaaacgctcatatcggttctcaaattccgtcaggtcactgttatcctgcctgatatactcatctgctgcactgatttccgctttcagagcagaaagtttctcctcgtaacgacctgttaattccatttcgcacaattcattcattttgttcatcttattcttttctccctattattatttttacatttgtggtaaccttgttacctgtgtgtgttgttttgttatatgttgatttgttgtgttatgtgtgttatgtacccgatgtgtgcagatcggtacataccgttttctgtcttattacaactataattgtaattttgtttaaagaaaatgtcaattcatttcgtccgacatcttatgatatgattcgacatttatctgaaaatacaagaaagaatcctgcccggagggcttttttatgttataggaacattacgaagtaatttcctataacataaaaaaactgctattcctcacgatcactgtaggaacaacagttttttttcatcattttttatgttcggcggataatcctgttcaatttcacaaaatctattaccgcctgttttccgatcttacagattttcttcatgttaatggaattcaccccgccctgacgaggtctgaatgtgacaggaagaaatttgatgctgcatcccttcttcttataaataacagccagaagtacattggaaagattaaagtccttcggaatcagatgtatgtacctggccatcgtctctgctttcatcaaacggtacggagtgttggcatctgtcagatttaccccaaaacagatacggataaccagtttcagagtttttgttacaaaaacacgtgatattccatcctgtctgtcttttctccagccgatgaccatatcatatttctgtcttcgtttccagaacggttcaaattcttccggcagtgtctggccgtctgaatctgtctggaaaatgtaatctgcaccatttttgagtgcatacttatagccataaagcacagttgcaccatgaccgccgtttggttttgttatcggaatcagcagagggcgtgtctttgtacactgtttcagtttttcatatgtagaatctttgctcccgtcatcaatgacaatcagacgtgactgaccgtttccgttatgcttctctataacaggataccagtcattaatgacctgttcaatgttatcctgctcattgtatgccgggataacaatgtataacttatccatatttctctcctttggatgattgatggtatccattatagcatacatatacatgaaataataatattatttcgaaaacgatgtactatagctgttactgttcactggtaatatcccgcgaggtgttttttgtgagcaaaggtcacagaaaacccgagacatactgcgcgaatttatgcgattagcataaattctgtgcatcgcgaagcgtgttgctgggaacggagtgaacagtaacctatagctctgccagtattcccagctcccgcgcaaggcgaagcagttccctgtttgcggcattcactgttccgaagtctttcagaggacagataactttctgacattttttcatcaattccacagccttatcataagattcctgtgaaatactttcgaaaggtttctctgtaatcacctggtctgcaagtgcaccggctacctgacagtctacatcattcgtgtgaagcactcctgccgcaaacggaattccctgtctctgcagttttcgataatacggaattccgcttccattaccgccaattacaaacacctgaggttcacctctgggcggatccatctccacacatccaaaagcagcattatagcttcctctggtaattccatacaacttccgaatatactcagaagtaaagatttcttccggagcaccatatttttctatatattctccatgtacacagataactttatcagatattttctgtgcaagatccaactcatgcagcgacatgatcactgtaagctgatgatccagcaccatctgtttcaaaatggtaagaagttccagcttatgacggatatccagaaaagaagtcggctcatccagtacaatgatctccggctcctgacagatagcccgggcaagaaggattcgttgtctctgaccatcgctgatagctgtaaaatccctgtcttttaaatcccatgcatggacggtttccattgatttctttacctttgtcttatcctctgcggagagtattcccaaagttcctgtataaggataacgccctgtggctacaatgtcttcgcaggtcatcagttccggacgcatacgctctgtgagcacgactgccagtttctgagagacctctttattggtcatctttgccattttctctttatccagataaacagtaccgctaattgtggcaagctgtctggtgatgcttttaagaatagtggattttccggcaccgttaggaccgatgagagtgaggatttctccctttttcagctgaatattgatttctctgataagaggttttccgtcatatcccacagtcagctgatccgtacggaaaaaatactgttcctgccggtctgctttgttattttctgtttcctttattacatctgctattttctctgacatattttttcctgttttccttttttatgctgcatcttatagtaatctgcccggatagcgtattctgctcctgctttttatatcaatttctcttctgtctgcggatcatgatatagattacaactggtgcgccaaacactgctgttacggaactgatactgagttctgtaggtgcaaatacggttctggcgatcagatcacagaaaagacagaatactgcccctcccagaaaacaggccgggatcacaaggagcggtctggctgttttcagcaggctttttacaatgtgaggcactgcaatgccaacaaaagaaattggtcctgcaaaagctgtcacacaggcagacagaatactggataagagaatcagtcctatgcggaacagcttgatattcactcccatattctgagcataaacttcacccagctgataggcaccgataggtttagacataaagaacacaatcaccattgtgagcagaactactgttgccattactttcacattaccccaggacattcctgaaaaacttcccagtgaccagttgtgaagattgacaatattggagtcatccgcaaaggtaactacgaaatctgtaactgcagaacagatgtaaccgatcatgacaccgctgataaccagcatggacatgttgtggacttttttggcaaccagcaggacaaatcccatggaaatcatagaaccgataaacgctgcaatgatcatggctgcagaacccatggaaatagatctgctcagaaaataaatcatcagaagtgcaactaccagcttggctcctgaagaaattccaagtacaaagggacctgcaatagggttattaaaaaatgtctgaagaagaaatccggatacagaaagtgctcctccaagaatgatcactgacagaatcctgggaagacggatttcccatattatattgtaagcagtcgcatctccctgatgtctgaaaataatattcagaatctcacccactgaaagatgaatgcttccggcatttacattccaaacaaataaaatcaccagaaacaccgccagtataaaaaatgctatccagtatctggctgtacgttttttgtcatccatattttttgttccttttgtttttatatttcctgcttttggcagttctgcagaatcccacaaacatatttcagtgccattcgtaaataactatactaatcgcatagaatgcgaattcaagtgtgccgaggatttacaaatatcattttaacttatgcatatatacaagttcatccagtgaatcatcatctgtagtaaggattgtatgaatatcttcgatcatggttccaagctcggtggtttcctggaaaagatttttacccgtacaccacacatttccatcctttactgccttaaaatctgccagaagattactttttgccagcagttcatcaatagtagaaagttcaccgtcgatagtactgttatagatgatatagtccgcatcttttgctttggcataaaattcttccatctgcatattcatggtagacaaagcgttatcactttctcctgtatcttcgggaacatatttgccgcctgcaagctcgatcatgtttgaaacataatcaccattctttcgcacattgacagcacctgtggaattaatataaaagaatgctactgttttacctgtatctttatcatcagaggtcagaactttgtcaagcttgtctgtctgctccttaaatgccttctcagctacatcttcctttccgagaagcacagcatagagtttcatccattcagttcttcccagaggatggctctcataactggaacgttctaccattaccgggataccaaactgttccagtttctcttccacctccggattatgatggatcatagttgattcaatggcaagaccacagccttcatccaggatcagttcataatccggtgcattgtacttgcctgcataaatcatttttccggattccatggcatcttttgcttcctggatataccatccattctcctgagttcctgaaagacgaatgctgtcaataccgtcaattgcgcggaaaagatccatggcagaggttgctaccagatagatgttgttcagcggttgttgaataactgtgatatctttttcaagcccctttggagccttttttccctctggaactacaagaaactgtccttcctgatcgatagtaatcagagcatagccatcattgtaatagtctacgctgaattcttctgcgtaggaaagttccatactgtggtcataggtaagtcccgggatatccacaggagtttttgcattgtctttatctgctgcgtatgctgtacagacagtgcatatacagataataaataatgcaactgacataaaaccgataaatattgttttttgctgtttctttattatgtttttcatcttcataattgtttctttgtttgtatgtgattattttgctgttttttctgcttctttggcagttgtggaatcaaaatttaaggtgtagtcaatctcgtgaggctcactcattgctactgtatctgctgttacctccatctctgcatcaaatacgctgacagggatttcaaaagtggagtttccgtctttattaaccggctcatatttctcaccatccacaagcatataatcatagttcggactgctccatacgatagttgctgtagctttatcgccttctacattaatggctgcaggagaatcaatggttgctcttcctgaaccgcctgtaagagttacatccatggtatagtcgccgtcttcaagattcagatctgccagagtcttaccttcacttgtcttactgtctttcgcatctttgtctgtgtcatctgctttggaatctgcatctttattttctttatcatctttttttgcatctgtatcatcagattttacaggatttttgacacttaccttatggtcataccattttccttttgttccgatcaaagctacatcgaattcttcatcaattgcgggtaccgggatatcaaatccatatacttcctcactcattccatcgctgtatgtaacagtatctgtggttggctcaagaacctctgccccgtctttctgtgcatcttctgcctttccgacgaaaaggtttacaattttcttagaagcaaggcttacatggatagtcatcttgccctcctttactgtaagggttccttttccatcgtttgcttcatttacatggaacattccgctgtctgtatcaaattctgctgtgtaggtgccatcctctaatgtatcactcttggatgcatctgtttctttattatctgtgttttctgaatcagcatcttttgcagttgtttcttctttatcagtggtttcttctgttgccgtatcagtatctgtctttgcagcaaccgggcttgtaccgatcagagtagctgaaatagtaagtgctgacattaataatgtaaatgaacgtttcttcatgattatttcttctcccttatcttcatattttttatagttttttctatcgtgctgttcaacccatctgctgcagagcaacaggcttttgaacaggtgatggcaaatatattatagtaattccagaaaataatgcaattaagacagttcctctggatctttctcagatgtgcgcacgttactgtgaacggaatgaacagaaacgtgcgaactgtttgcagtattttatggaattgctatgacttctttttttcttatcatataatatatctgcccggaaacttttgcaagttctccgggcagtttatcttgtttgaacaatattttttattcagcgtcagcctctgcagtatcagctgttgtctcagctgcgtcatctgcctgtgcatcgtctgcactgtcatctgttgctttggcatcagtatcttctgctgctgcatcgtcagatgctccaagagaatcaattgctgcttttgtatgagccacatacagatcttctactgctgcgattcttccaagacctgcgatctgacagtcaacactgtcgaaatcaccggatgcctcaaactgagatttccaggaatctgcatcatcaccagccatatcattgttagcgtggtctccggcaacaaccatcagaggacgaaggattacattcttgaatcctgcttcttttactttctcgataaccttgtcacatgctgtgtcttccggttctccctctacagttccgatgaaagcgtttgtgaatccaagatcatccatctgtgtctgcatctggtcataggttacgttagctgtatgggatgtaccatgtcccatgaatacaaatgctgtgcctgcatctgctgctgctttcatatcatcaaatccagcttccttgcaagcttcatctgtgatcgcctgagcaactgctttcttgtcatcattgatcactgtagcgtcatcaccaacttcaccgagcattggctctgcaattgcaacagattcaaatttgtctttgtattcatcaattgcctctgtcatttcatcatattctgcaccatgcatcagatgtgtcggctgtacaacaagattcttaacaccgttagctactgcacggtcaagagcctgctgcatattatcgattacttcatcatctcttgcctgtacatggttgatgataatctgtgctgtaaatgcacgtcttactgaccagtccggatatgcttttgcaagggcatcctcgattcctttgatatcctctgcacggctgtcgttgaaggatgtaccaaaacttactacaagaagttcattctcaccaatctcatcctggttacgaggatcatctttggaagcatcacctgtgtcacgtccaaagtattcagggcttgcttcttcacctgttaccagttctttctgagcatctgtaagtttgtcccatgcttcttttgctgctttgcagtcttcgtcagttgtgtctgttctttcctgaacataaatcttatcgatcagggcaccaacttcgtctgcggctttctgatcatcatcagaagcttctgttgtatcatcagatgcttcctctgtatctgctgcatctgcatcgtctgcagctgcttctgtgtcatctgcagcctcttctgttgctgcatcatcagatgcaaaagcaactgtacctgttgctgctgtcatggaacaggtcatggatactgccagtaataaggctaacatagattttcttttcatttcgtttttcctcttttatttctcgtatttccggacaattgtatgcacaaaaaaagcaactgcatattctgcagctaccgctttcccataaatacatggtttatatgtaccagatatatctgtaatttccgattctgtctgattcatttaataaaagagctatgtatcgttatgagaatacaggttctgtataccgcagaccttaaattctacgccaaggcagttctcctgacttcgatcatcgctgtttctcccttcccggtttcccagtggtttctgaaaagcagctcccatacacagtgacggtatcgctccggattctcaccggattctcttttgcacatcaagtacgatgcaacctttgcgttataacattgcacatattcaattcggatattctttttttatcacattttaacaaaaatgtcaatacaattcgtgtatattttcctttaatgtttggcattagtgttactgttcactccgttcacagtaacgtagccaaaattcattccagattgcctgcggcaatggaattttggcttgtatgtatattatcgcgttattcattacacttctgtcagggctttgaaaaaacaggttctgtttccggtatggcaggctgcaccgatctgctctactttagcaaggatcgtatcattgtcacaatccagtgtaagggattttacaaactggagatgtccggatgtgagtcccttcgtccagagttcattgcggcttctgctccagtaagtcattttacctgtttcaagagtggtattaaatgcttcttcattcatatacgccagcatcagcacttcgtttgtctgataatcctgggctataacaggtaccattccatcactgtttaatttaaaatcagaccatgcgatgctactttttaaattcactgtattttccattttctgtctccatctaatttattgattgccataaatcatttcgtaaattttcaaattttacaaactgcccttggtagacagaacatccgtgatccttggatcataggatgtggctgcgtccagtgctttggcaaaacttttgaacattgcttctgctacatggtgattattcccacctgccagaaccctgatatgaagattcatgccacaggcataggaaatggcatagaagaactcttttaccatttccgtggacatgtcaccgatcctgtctgtggtaaactctgcatcccatacaaagtaaggtcttccggacagatcgatcgcacagagcaccagggattcatccatgggaaggatgcagcttccatagcgcttaatcccctttttgtcaccaattgcttcttttaatgcagttcccagaacaattcctgtatcctcgatggtgtgatggtcatccacctgaagatcaccatggactctgacactgagatcaaagagcccatgacgggtaaatccatccagcatatggttaaaaaatcccacacctgtctcaatatcagaatatccggttccatccagatttatttttaatttgatttctgtttcttttgtatttctttctgctgaggcttctcttgccatggttaagtcctctctgtcttacttattttcaaacactctgaatccattgttttaatgcgcaaactacagtttacattatagcagatttcagattcaaagccttaccattattcttcatcttcatcctcaaaacgaactgctatagaatttgcatgtgcagtaagctgctcagaagttgcaaactgaatgatatctttgtgtatattacgcagtgcggattttgagtaatatacaatacttgatttcttgatgaaatcatctacggaaagggctgagaaaaatttggctgttccgtttgtaggaagtacatggttcggacctgcaaaataatctcccagtggctcggaactgtactctccgataaagatcgcacctgcattcttcactttcatcatatcctcaaagggattggctgtcacgatctccatatgttccggagcgatttcattggctgcctcaatcgcctcgtccatatcctctgcgatcagaatgtatccaaagttatcaagagacttctgaatgatttcttttctggaaagaacctccacgaaaccttttacttcttcatctactttcttcgcaaattcctcacttgtagtgatcaggatagcacatgccagttcatcatgctctgcctgggaaagaaggtcagctgccacaaaatgcggattagctgtctcatctgcaagaacaaggatctcactcggtcctgcaatggaatcaatgcttacataaccatatactgctttctttgcaagagctacaaaaatgtttccgggacctacaatcttgtctaccttcggaatgctctctgttccgaaagcaagggcaccgattgcctgtgcaccacccactttataaatctcatctgctcctgcttctttagctgctaccagtgtggaagcgcatactttgccatcctttccgggtggtgttgtcataacaatgtgcgggactcctgccacttttgcaggtacaatattcatcagtacagaagacggataaactgcttttccaccgggtacatagacacccacacgatttaacggtgtcactttctggccaagcatggttccatctgttgtgcttgtaaaccaactgttctggatctgtttttcatgatactggcggatattgaccagagctttgcggattactccaagaagtgcaggatcaatctgcgcataagcctcttcaatctctgcatccgtgacacggatcgtctcttttgtcacatcggctttgtcaaattcttttgtataggcaaaaagagctgcgtccccttcattttttactttatcaaggatctgagctactgtggattcaaattttccatagttattcgggcttcttttcagcagattctcaagaatatcctttgttgattcttttgttaattttactgtacgcatctttacatctcctcctgaagaactcttcttaagtcttcaataagtttacggattctctcgttctccatcttcatgctcacctgattgactaccattctggcagacagcgggcagacctcttctagcactttcagcccgttttccttcagtgtacttccagtctccacaatatctacgatcacttcagacagaccaacgatgggtgccagttcaatagaaccatttaatttaatcagatctactgtctgatgttttctgttaaagaagtaatctttggcaatatttggatatttagtcgccacacggatcagctggttgttctccagaacttctctggcactctccggtccacagacacacatcttacattttccaaatccaagatccatcacttcataaagcttacggccttcctccaggatcgtatcctttcccacaattccgatatctgccgcaccatactctacataggtaggaacatccggcccttttgcaaggaagaatttcatcttcagttcttcattggtaaagatcagtttacgggaatctttatctttcatctcttcgcaggtgattcctgctttctcaaacatctccattgttttgttggcaagtctgccttttgtcagggcaactgtcaggtatctcatggcttatctggcctcctttttcaaacgtaatgccacacatctgccctctgcacgaagtttctgtgcctctttaatggcttctgtacggttctgtggctcgtattcgattacttccggcttctcctctttctcagaaatcagtttctggctggaaagtgcaagaagaaggttatctacttcaagggcaaatccgatagatgccgcaggtttgccaaagtgtttcatcaggccattgtaacggcctcccttgatcataggttcaccggttccgtaagtatatgcctggaaaatgatacctgtatagtactgatatttactaagcattccaaaatcgaaagagatatacttttcatatccgtagtttttcataatctcatagatttcttccagtctggaaactgcttccagtgcgcaggcgttgtttgtcagacttctggctttctttaagacttcttctgaaccaaacatctgtgggatttcagtaaaggctttctgcatactgtctttgagtttctgttcttctacaaactcttctactccgaaagaatttttctgcgagatcaaaacacgaagacgttcttctgcttccggaccgagttcggcttcttttaataaggatttgaagtaatctacctgtccgacactgacctgaaattctgtaagacctgctgccagaaggcattccactgtcatggcaagaagttctgcatctgcatctgcggattcatcaccgatccgttctactcccatctgtgtggtttctttgagatgtcctctgtagctggtgttattaataaatgtgtttcctgtgtagcagaggcttacaggttctttgtccggggaaaagtaggttgcacaggctctggatacagacggggtgaagtcaggtctgagtaccagggtgttgccttctctgtcaaagaatttataaagttctttggatgggatggttcctacttcgcggctgaatacttcaaagtattcgaatgtcggggtttctatgtcttcatagccatactggtggaagacgcgatggattttctcctgtacctttcttttctggctgcattcgccgttgtagatgtctcttacaccttcaggggtgtggaaaatacgctgcatgggtggtcctcctcttggttatgttgtaattctttttgttattattttatgttttactttagtgtggtaacgtgctaccaaagcaatgtgtaactagatagaattataataggttttcaaataaatgtcaagtacagttaatgttattgtattgttgtttttgtctattcgttatgtgtgtttagagggacgctcagaaacatattgtatttgaggtgcggtttcgcaatgtggaagattatgatggctatagcaagtctattaactaatgcatttaagacagttcagccgagtgcgaaagacaaggaagatacctacaggcgtgctgacgcacgtcaaggatatctgacgcaggattttacgctctgatgaactgaatcaatatacattataagaggcttgctataatatgccagcaagttgatttcttcatggttactgccaatacacagcgcagaaatttattttatttccggtgcatttgcaggtatcttagagcgtgtctgaaaaaggctttctgcaagatgtgcgtcacaatttgtgggatattttgcccggatgagggcgccgtagcgggctacggcaactgaattcgggtgaaatatcccgcaaagtggggcgtgcagattgcgggaatgatttttcagacacactctagagtttcttaggcaaaaaaaatctgcgttatgagccggctgtttcactgtctgagcgaagtcggcgacggagcgagtttgagaagacggctcatgcttttagcagattttttttgccttagaaactcttagatgccgaaaccgcaccggaaataaaataaatttctgcgcgtcccctttcctattcccgttcattaagatcagtctgaactccatcaagaaagggcacaagaaacccgctttttttattcaaataatactgagattccagttcttcgcgccggaagctcttgcggccgccttcctgcatccggttccagaaagtaaggagactgcgcagtgtaaggtaatagaactggttttcatggctgtagaatataagaaaaaaagccacccctccctgcttttcaaatgcctgcataaattccacctgatgaggatggatattcgcaagtggaaaagtatccgccgcacattctttggcatcaaagcagacagggataccctgtactgctccgatatagtctacagtgcttcgttgctcgaaatatgccagcgtaatatgacggttttccttatccatacggacaggtgtgatcggagtgggaattttttggataagtgccagtcccttttctctgtattgttcatttgtacgatttacaagatcctccagagtggatccccgcaaacctctgctgttccatgttgccactttatttctccgtaaattttattttctacttcaataattttaccgacggataatacctgataactgcctttccgacaatctcatcaaaggtcacaaaactggtgcttttccagcaacgggagtctttggaatgattgcggttatcacccaggacgaaatagctgttttcgggaacttcatacgggccaaagctgccccttggtttttccggaacgaaactgtcatccagaggaatctctgaatcattgatatagactttgccgtccttaatctgtactttttctcccggaagtccgatgactcgtttgatgaaaagcttgctttcgtcatccgggtatttgaaaataacaatgtcaaagcgttccggatcttttattttttttgatatttcatgtccgaagaaatccagattgagtccatatgcaaggcgaaatccgaaaatacggtctcctgtcataatggttttttccattgattcggaaggaattttggcattgatcagtactacgctattcacaagcgttacgatcactactactatgatgatcatttttgcgtaatcccatatttctttccagattctcatgataagcctcctcaagattttcctctttgatgattttacagaaaagctccggtgccggcgccacaaaggtctggtctgtctccggaattactaacctgtatgcatggagaagctgatgcctgactccatggcggatgtattgcttattaaattcagaatctccgtatttggtgtctccaagcaatggatgtcctattcctgcaaggtgagcacgaatctggtgagtacggcctgtgatcagctcaacttccagaagagttatttttccgttgctgccaagaggacgatatttcgtttcaatcggcagggaatctttgaattcctgtctgcttacgattactttgtttgtttttttatctttgtgcagataacccctgatatgatccggtttttctattttgccttttgtgaggcagatatagtatttgtgaagtgttctgtcgtggaatatcctggacagaaactgcagaccggcaagacttttccctgcacagaccattccgctggtattacggtcaagtcggttacatacagaaggtctgaaggttttgagctgttcttctgtaaggtcacctttctttaaaaggtagccggtcaggtattctacaagggacggttccccgtcatctgccggctgtgaaagcatccctgccggtttattgatgataatgatatcaggatcctcgtaaacaatatccagttcgcagtatgctcttgctgcctgactgcttcctgcaaatttatcgaaagtttcatcactcagaaacagtttgatggtatcgcctttgagaagtttttcgtttcctgtggctttctttccatttagagtgatgttctttttgcggagcattttgtaaaaaaaacttttaggtgcttctctgagaagcttggccagatatttatcaaagcgctggcccgcttcattttcttctataataaattctttcatatttaattgttcctgtataattatatcaaactccgaaataacacattgctatagatatattttgtaattgaattccggcgactacagacacaatgccagaatggtctgtcggatcagttcgtttctggaaagatccggatatttttcgtccggggtaaatttgattccttcttccagaccttctctgtgatcgttcatggaatcaagacgttccaggaacggacggagatctgtaaaaattttcaccgtcactttataaccgtttttacggatgatcttctgggaattggtttccatgaaagatgcatcgattttcggatcactgctgtaagccactactgtatttccacatactgctactgcatcaatataggcacttttttcataaaaagtcatgtaaagttcatatgccatatccagactgccctgatgctcatggattttctgatataatccggcatccattggtctgcatttcaaaatcatgatcagattcaccatggatttacatgccggaagacagccaactacagttacaactgtccaaacagtcattcttgtcttaaaatagaaccaggatgtaaaaaagatgaataagggtactgcaaaaagaattgcagtgatgatcaggcggcgtctcttttcacttctgaaatatccgaagttccctttggatacttttgaagatgttttcgctttactttgttttttatttctgtttttcttttctgtcacttacgtcctcctccggaatttttcttatgtatatttctgatagtgttcttctttgcagatgctgaactgtttttgttgtttttgttatttttgctatttctgctgtttttcgcattccgactgctgccctgagtatgctgttggcctccatgattctctcgaagcggccggatcaaacatttagggccgtaacctaccaggtccattcttccggtcattttgaggccttccagcaccagttctctgtttgcaggattcttgtactgcatcaaagctctctgtattgctttttcatgggggttcttcggcacatataccttctcacctgtaagaggatggattcccgtatagtacatacaggtagaaagagtagacggggttggatagaaatcctgtacctgttccggggtaaagccaagatcccggacatattccgcaagttttactgcctctttcatggtacatcccggatgggaggacatgaaatacgggacagcatactgctgctttcctgtttgcctgtttgccgcatcatattccttaagaaactgctgatagacgctatgacttggttttcccatatacttcagaacctgatcagacacatgttccggtgccacacgcagctgcccgcttacgtgatgttccaccagttcacgcaaaaaagtcttgtccctgtctgccaccacataatcaaagcgtacaccggagcggatgaataccttcttcactcccgggatcttccgcagcttccgaagcagagaaacgtaatccgaatgatctacagtcaggtttttgcatggcgtgggaaacaggcactgcttattcttgcagacccctttcgtgagctgtttctgacaagatggttgtctgaaatctgctgtgggaccacccacatcgtgaatataacccttgaactcaggatcatttgtcattctggtagcttcttcgatcagagactcatgacttctggtctgaagaattcttccctgatgaaaagtcagggcgcagaaattacagccgccaaagcaccctctgttgcttgtcaggctgaacttgatttcttccagtgccggaattccgcccagcttctcatacatgggatgaactttctccgtataaggcagggcatatacatcatccatttcctcctgtgtcaggggcagagcaggaggattctgtataatatatccctttgtcccataagattctgccattggtctggcgctgaatggatctgtattctgatactgaatggcaaagctgtctgcataaaccttcttgtttacttttacttcctcataagaaggaagaataatcggatcataaactctcgacagatccctgcacttaaatacagttcctgcaatataggtaagttcctctaccggcagtccactcgccagcgcatctgcaatctctatgatcgaatgctcacccattccataggaaatcatatctgccccggaatcaaggagtacactgtgttttactttattctcccaataatcataatgtgccagtcgtctcaggctggcttcaatcccacccaggataatgggtgtctttttataagtctgacggatcagattgctgtacacgatcaccgcgcggtcaggacgaagtcccatctggcctcccggtgaataggaatctttctgcctgtgctttttagagactgtatagtgatttaccatagagtccatatttcccgcagacaccagaaatcccagtcgaggctctccaaatacctgaatactctccttctttctccagtcaggctgaggaatgatccccactttatacccacgactctccaacagtctgctgatgatcgcagtaccaaaggaaggatggtccacgtaggcatcacctgtaatataggcaaaatctacctgctcccaccctctctgtttcatttctttctttgttaccggtaaaaaatcctgcatttatattttcctcgtatgtattatagtcatgcggatatgatcatccgccacacagttctacatctgcagcaaacctttcaaattatcatttccggataataatcagacatgatgatacactgcctgtgcccggtatccttcagatataatatcaagctgtctgtggaaccgcttcagctgctgaagatcttttgttttaaatactctcaggaactcatcctgaatcttcataatctcccgcttatttgcaatcttgtacagattttcaatgttgatcagaatatccttcaccagattagactgcatctgtgacgaattctgtgcatccataatctcattccgcacagaagacatctcatggtcaagagcattaatggcatctgctgccttgctcagacgttctgccacatgccccggcatatcccctttatatttatattgcagggaatgctcaatcgtcgcccagaagttcatagccattgtacggatctgtatctccgcctgcagcttctttggccctttgatcgtatccactgtataataaataatcagatgataacttctgtaaccactctgtttaatatgcttcagataattcttctcactctttataaccatatcgcttctcttctggatcagggaagcaaccgtctctatatcctcctcaaactggcagataatacgaacaccggcaatatcctccagttcttcttccattctctccataggaatatgcttgcgctgcattttctcaagaatactgctcacgctcttaaccctgccctccacctgctcaatcgggcagtaaacatcattctctttgcattcatcaataatgtgattgaatttcacttccagctctctcacagccagttcatacgggcacaaaatgcttctccataactgtatttccattttcactcgctccttgcatttcatacattttgttattatagcatagattttgaaaaatatctcgctaatatgaatagtttctgttttttttagaaatgcggttactgttcacacaccactatcccgcgaggtgttttggcatgaatatgccaaaatcccgagacatacaagccaaaattccattgccacaggcaatctggaatgaattttggctacgttactgtgaacggagtgaacagtaacgaaatgcctagttccgcattctgatacagtatatgcaaagcaccggacatatagaacattcaaaaaagcacccctgccgccaaagcgcaacagggatgcttccaacatcactctttaagagcctccagaactttcaccagatacttccagactctctctgtagaagaaatactaagcacctcttcagacgtatgaatatccttcatatcaggtcccagagacacacagtcaagtccttccatcttcttatagaaaagtccacactcaagtcctgcatggattgccaccacattcggtttctgtccatacatttcctcatatacttccaccatcttatcacgaagcggtgaatccttgcgatactcccacgcaggataaacgccctgtctctcatactctccgccaaggaactccgtcagataggcaatcttgtcagaaagggaatctctggctgtctccacagaacttctgatactggaacttcccattacctcattctcagaagtcttcagaataccgatattcgtagaagtctctaccagtcctttgatcgttccgctcattttctgaacaccataaggtacatttacaaggaagaaaattactttttctttacttgtgggatgaagaacccttacttcctgttttccctcatcttcaacagttactgtgataccctcatcagttcctgcatactcttctctccatgctccctgcacagaagccgcatattctctgacagcatctgcattttcttcaagaacaaggatttctgctgtagcctcccttgtaatggcattatctttctgtccgccctgcacactgatcagttcaaaatctgttttctcatccagaccatggagaaattttccgagaagagaatttgcgtttgcacgattcttgtcaatctcagctccggaatgaccgcccatcagtccgctgatcttaactgtcagcttctctccctctgcatccagtcttgtcactggaatatggctgactccggaaagtccgcctgcacagctgatccagaggcttccttctgcttcagaatccagattgataaatcttcttccttttaatacactgcagtcaaatccaactgcacccagaagaccgatttcctcatctacagtaataaacacttcaagcggcggatgagcaattgtatcactttccagaagtgcaagaccataagcaacagcaattccgtcatcaccaccaagggttgttccgtttgcagatacatagtcaccttctacagaaagatttaatccgtcttttgtaaaatcatgctctacatccggacgtttctcacataccatatccatatgtccctgaatgatcactacaggagcattctcgtatcccgctgtgcccggtttataaataaccacattattcatctcatcctgaacatatttcagatcatgatcctttgcaaactgaaccagatagtcgctgatctgctttgtatttcctgagccatgaggaattttgcatatctcctcaaaataatggaacactcttttgggttcacaattctctaaaactgccataattatattacctccaaaaatcacacatttgtcttataatataccattgttttcccgatatacgacaaattttctagatatattttacccaaatactatagcatttattttcattctgcgccatataaattttataaagaatggcaaacaattgcaaagaggttgttgtatgtccaaaaacaccatactcaccggtggtatttgttttcttcttgtctttcttctgctgcatcctgctgaaagtctgtcctgtgccagagccggaatgactctgtggctgaatacattaatcccaacgcttctcccatttattattctcacaggaatgcttacacataccggtcatatccggaaacttctcctgccatttgaatcattctttcatatttttccgggtgtcagcatctggggtggttatgttttcgttctcggaatgctgtgtggttatcctctgggagccaaacttgcctctgatctgtatggattacataaaatcagcaaaaaagaagctctttatctcactaccttctgtaacaatccaagccctgcctttatcattacctatctctgtaagtcctgtcttaaggatacagtacctgccggcatggtctttgcgagtattttttcagcaaatctgatatgtatgctgttctttcgtttttttgtgtaccaaaatgccaccatctcagattccccaggattttcacccgagatttcttctcgaaaaaatatgcttgatttttctataatgaacggttttgaaaccattacacgtctcggaggatatattctattgttctccattctggcaggatgtatcagatattatgcgccttttccacttctctatcaatacctgctgctcggatttacagagatcacttccggactttctcttatttcagtttccggactgccatacatgactcgtatacttttgtccgctgcagccaccgcatccggcggtctgtgcatccttgctcagacaaaaggtgttctccaccatgacctcagcattctgccttattttatttccaagtgtatctgcacattccttacagcaggtattctttactgtctgatttcctatctgtgaaaataaattctttccgggaactgtcatcatttcattatacaaaatcagggcaggaaattttcctgccccttgttttctcatcttctatatttataactgatttatttttagttctctcccagatcatctaacagatcgtcatcatcatctttcgctccgtcattatcatgataagagcctgtaattgctgcagcctgtgctgtctgaggtgcaagttcctgacgattgtggtttacaacatcaagacaactctgcagggaatcaataaatgttttgtatttcacacctgcatcctctaatgttgtattaagcacactgccaatattggccatcatatcatctgtataggtgatcgcgctgaggcgaatgctgtttgcatcctgtgttgcagaatccagaatctcctgtgcctgtttgttagctgcattgatcgtatcatttgcctgtgcatatgctttctgcataatctcatgctgtgttaccagttcctgtgctcttgcctgtgcatctgcgatcagtgcatctgccttagtctgagcatcctcaaggatagcgtccttattgttaatgatcttctgataacgtttaatctcatccggagttttcaggcggagttctctcagaagttcctcaatttcttctttatttaccacaatcttagtagttgacagtggctggaatttacagctgtccacatattcctcaatctcaccgataatctgttcaattctgctgctcatagtatatacactccttattttctatttctgttactgtacgctctatgtgaacaataacttatttgttgtctgctgtaagacgaatcttctcaataactgcatccgttatctcggccggtgcaaacttactcaggtcgcctccaaaatgtgcaacttccttcaatattgtagaactcaggtatgcatattccagacttgtagtcagaaatacagtatctacatccggtgcaagtacacgattggtctgagccatctggagctcatactcaaaatctgtaactgcacgaagtccacgtatgatcacctgagcgtgattctctctggcaaaattcacagacaatccctcaaatggttttacctcgacattaggaacgtcccgagtcgccttttctaatatattaacacgttcctgcacagaaaacaacggactttttgaagaattatgtaaaacgcccactatcactttgtcaaaagaaactgctgctctccggatcacatcaagatgtccataggtagccggatcaaagctgccgggatatactgctattttcatttatttttactctctctttcctctggcacatacacatatgcataacaacacgaatgctgcctgcaggcagcaatcttatgataatttcaggaagcaatgtattcattctgaaattattatagttaattatgcacgttctaaaaatacatgcttatttgttttatactctttcgaacgcagctgcctgtaaccgagagattccacataactgaaatccgtctgaagatccgcttccacaataataagtgtattcttatctgcaactgtgctgtctttcagatattccagcacctgtctttccagttcattattatatgggggatccataaaaataatgtcaaaaacaccttttccctcaagggaacgcaatgcctgcaacacgtccatgttcagcagtttaccatcttctgccagttttgtaaatgcaagattttctttgatgcatgcagcagcttttggattcttctccacaaacactgcataagaagcccctctgctcagagcttcgattccgatcccgccacttccggaaaaaagatccaggaaacggcattccaaaagctccggctgaagtatattaaataatgtttctttgattctgtcagtagtaggtcttgtgtctatccccggaattgttttcaaattaagccttctggctttacctgcgatcactctcatttcagattcagtctccaatccaggtctcctcttgcaagccctaaaataagaagttctgctgtggcaatatttgtcgctacaggaatattgtactggtcgcatcttctcacgatgcttgtgatatccggttctttaggatcgatcatgaccggattgtagaacagaatgaccatatcaagatcctgacgctctaccatctccataaactgcttgtctccaccaatactgccggcaaggaatttatgcacatgaaggcttgtcgcttcttctattctccgtccggttgtacctgtggcatagacctcatgtttggcaagtatattcttataagcgatgcagaaatcttctatcagtacttttttactgttatgtgcgattatacctaagttcatagtttctcctctccgtttctcctatttattttgcggattttatcttttatccacaatcctaactgtaattataacaaagcactaaataaaacgcaattaaaacttaaaaaatatacataattcataatttattaatatttttcttacagtcatcatgcaagttttcctgtttccatgctcttcctgtccatgcgaaaacttccagtgtattatttctgcatcttcatatactagcattgcaacacaaaaatacttcaaaagaaaacaacaaccaaggaggaaattgatatgtcaaacacaaaatcttctaaccagacagctgtaccggaagcaaaaggtgcgttagaccgtttcaaattcgaggttgcaaatgaattaggcgtaccgcttacagacgggtacaacggtaacctgacttctaaacagaatggttctgtcggaggttatatggtcaaaaagatgatcgaagcccaggaaagacagatgtccagtggttcccagggcggacagtactaatcagataaaagcctctcagttgaggaactgaaaaaaaccgatggtgatgactgaaaacagtcaaatccatcggtttttctataaaagcgaattaataaaatcagatcatccctatcagatgtacgatcagtgcagccacccaggcaatcacacactgccataccacaacaccaacagcccatttactgcccatttcacgtttgatcgaagcgatagccgccacacatggtgtatagagtaaactgaataccagcagggatgctgctgccagcggagtcagtacagaggcaatatttccactgaaaagtacttccagagtagataccacgctctcttttgccataaatccgctgataagagctgtacagattctccagtctcccagtccgatcggtttaaatataggtgccaggactcccgccaccattgccagaatactgtctgcagaatcttttacaagatttaaatgcagatcaaagctctgcaggaaccagattatcattgatgcaagcaggataatagaaaacgctctctgcaggaaatcttttgctttttcccacaaaagctgacctacattccttgctcccggcagccggtaattgggaagttccatgacaaacggtacgggatctcccttgaaaagagttctgttatacaaaaatgccgccaggattcccaccaaaattccaagcaggtaaagacctgccataataaatccgcccttcttcgggaaaaaagcacttacaaagaaagaataaatcggcagcttcgcagtacagctcataaatggagtcagcaaaatcgtcatctttctgtcacgctcacttgtaagtgtacgtgtggccataacagccggaaccgtacatccgaatccaatcagcattggcacaatgcttcttcctgaaaggccgatcttacgcagaagtttgtccatcacaaaagcaacacgtgcaacgtatccgctgtcttccataagagacagaaagaaaaacagggttacgataatcggcagaaaactgagtacacttcccacacctgtaaaaataccgtcaatgaccaggctatgcatggcactgtttacatttgctgctgtcagtgctgcttctaccagcgcagaaaccttatcaattccaatctccagaagcccctgaagccacgctccgatcacattaaaggtaagataaaataccagtaccatgattccgatgaaacagggaatcgcggtatattttcctgtaaggactttatcaattttctcacttctgattctctccttactctcttttggctttacaactgtctgttcacacaaacgctcaataaagtcaaaacgcatatctgcgatcgcagcgcttctgtcaacctgacgctctgtttccatctgctgtacgatatgctccagcatatccgtctcatttgtgtccagcttcagcttctcaagaatcagcggatctccctcgattgccttggttgctgcaaaacgggtaggaatatcagcctgcgccgcatgatcctcaatcaggtgcatgaccgcatgaatacagcggtgtactgcaccgtcatggtcactcttatcacagaaatcctgacgcagtggatgttcctgatatttcgctatatgtaacgcatggtcaaccagctcatcaactccttcattctttgctgcggaaatagggattacaggtactccaagcagcgattccatcttatttacatctatagaaccctgatttcccagcacttcatccatcatgttcattgcaactaccataggaatatccatctccagaagctgcatggtcagatacaggtttctctcaatattggtagcatccacaatgttgatgatcgcacttggtttctcatccaggacaaaatttctggagacaatctcctcactgctgtaaggggacatggaataaattcccggaaggtctgtgatttctgtatccggatggcctttaatcgaaccggtcttacgatccaccgttactcctggaaagtttcccacatgttgactggaacctgtcagttggttaaacagtgtagtttttccacagttctgatttcccaccaatgcgtacgtcagtgtagttccctcaggcagtggatgttcatcttctctggaatgatactttccatcctctccaagtcccggatgtgccaggtcgcttacagcctctattccggcgtgacttctgcttcgcttcggaatctgttcgatttctatctgctctgcttccgcaagtcttaatgtcagttcatatccatgtacctgcaattccatgggatctcccatgggtgcaaacttcacgactgtgacctcagctcccggaatcatacccatatccaggaaatgctgacgcagggcacccttgccgccaaccgacgtgatcacagcactttttccgatttccaaatcttttaatgtcattttcagtcgctcaccttttgtatttgtatttggttatcattgctatatccgatttttctcaataaccttatgcagatagcttatactaactgataatttttgtcaagtagcaggtatgtctcaatttttttataaccgaaagcacaaaaaactcagatgaatttatgttatcatctgagtttctcaatgtcttaacctgacaggtcattaaacctgtctgtgattacttcattacttattattctgatcattctcaagtaactgatttatgtgattgccctgagatttgaaaattgttcttattttttatatgtcagatccacacagaacctgtaatatcaccgttaattacataatatgctttgttctcttcaggtttgatatagatcttaatatctttgagatctttctcctttttacccagttcgtctgtccagattcttctgacattacttaaaatattttttgtatatacttctctgcccatgaactgaatatatacttctgctgttgcttctttcttagtggttcttcttgttgtcttcttctcggcagctgtctcttcagccggtttctcagctgtcttagcaggagccttctttgtagttcttttcgttgtttttgttggttttgcagcagtctttgttgttttagctgtctcttttttctcggcttctttctctgtttctgccggtttcttttctacagtgtctgctgctttagctgtttctttcttctcggtttctttctctgcttctgctgatttcttttctgcagtctttcttgttcttcttgctgccggtttctttgctgttgtttctttctttacagtctctgtttcagcagtttctttcttgtttgcttctttatttacagctacttcttcagcagttgtctttgcaggagcctctttaacttcggttgtcttcgcagtggatgtgttgagatctgctgtagttgcttttgttgccatatgattagcctccttacaaggtataagtattcgtaactgctcagttttgtacagttacaggtattcttatgttaccgaaaatatgataaacagtaacattcttttatgaaaatagaatactacgaatcttctgcttttgcaatgtttttctgtttttataatttaggcatcttatgaacagtaacatgaacagtattatttttactctgtatctgtcattttctatagtcctagattctgcagatcttccttcatatatgccgaaagtctcctctgaagttcctcattctgcggaaggcttaaatccgcatcaagggacagaatctccgaagccgtttcactggcagctttcaggatatccgcatcctgatagatgtcccccagtttaaattccagcagaccactctggcggattccaaaaagatcaccaggaccgcgaagcttcagatcctctcctgcaatataaaatccatcgttggatttattcaggatctgcagacgtttagaaatttcctttgcaccatttccctgcataaaaatgcaatatgactgatattcccctctaccgacacgcccgcgaagctgatgaagctgtgccagcccgaaacgctcggcattctccaccatcatcactgtagcattaggcacattcactcctacctcaactacagtagtagataccaggatctgaatttcccctgtggcaaaagcctccatgatcacattcttctctttcgctttcatctttccatgaagagaagcaatctttatatccggcgaaaaaacattgcgaagcttcagggtataatccagcacattttccccatccatcccttcgctctcctccaccattggacagatcacataaacctgccgtccctgacggatctgcttctccataaaggaataagccttcggcctgtaagaagtatccaccacacaatttttaatgggaagtctctgcgcaggaagttcatcaattactgaaatatccagatccccgtatataatgatcgccagcgtccttggaatcggtgtagcactcatcaccagcacattaggcgggtttcccatagtagtcagtgcttccctctgtttcacaccaaaacgatgctgctcatctgtaataaccagtccaagattattgtactgcactttttcctgaatcagcgcatgcgttcctatcaccaggttagcctcttttgacgcgatcagcgcatatttttcccttttctccttcgcagtatctgatcctgtcagcaaaaccggatgcccaaaatcaatattctgttcctgcagcaacttctccattgcctgaaaatgctgccttgcaagaacctccgtaggtgccataagcactgcctgatatccattctccacagtcatgatcattgcgagaaacgcaaggattgtcttaccgcttcccacatctccctgcaccagtctggacatcagggcctggccgcttaaatccctctcaatctcatgccacacattcaactgcgcctttgtcagatcatagggcagactttcaataatctgctctgtcgtccacaccggatgcatgggaaacgcattcggtgcttcctccgtcttctctttcaaagactgcacagcaagaataaaaagaagaaactcgtcaaacaccaaccttctccttgcagctaacagctcctgcatatttttgggaaaatgaatcgcaggaatcgcaaaattcctgtctgccaggtgatacctctccttatactcatctgccagatactctgcctgaagcttctgctcatcaagcacctgatggatcagcttcacgatcgtcttattagaaagccccgcagtcagtccataaatcggctgaagactgtgcagaatctcctcataagccgcaggcgtaaaaatctcagggtgctccatctgcagcttcccctgcttcctgacgacacgcccccgcagaacaaacctgctgcctttcctgactgcagagcgcagatacggtgcattaaaccacgtaacagaaattttccccgtaagatctgccacagtggtcgtgatcacctgaagattccgcacctgattcacatacacacccgttataaccgccacagaaatcgccacaacagctccctcttccagagaccggatctcaacaggctcctcatacgcatcataattacgtggataataactcagaagagattccatatccgtaactcctattttcgcaaataacttttccgttttctcccccacgcccttcaaagtacgcaaagatgttgacatataccaccgattcctttctactacaatataattatgaatatcccttacagccagtaaaaattatctatcttatccctgcaaaaaataaccaaatcaagcaaccctctttcttcaatcacaataatctgccgacaataaacttccactatccaaatctcaggcaggaaaatatttgtgtcaggatgcatttgcaggtatctcttagatgccaaaaccgcatcctgacacaaatattttcctgccgtcccctttttataacacgaaaacggatatacccaccctcaacaatggcctatacccgttttcatcacatgaactattcgtttatctctctcaaaaactctattatcctactctacagaaataacataataataaatcggctgtccacccgcattcagttccacatcacaatccggataagcctcctccagagccgttgccagctcctcagcttcagcctcctcagtatcagcaccataataaatactgatcacctcagactcatcatccaccatctgggcaactgtctccttggcaacttccatgcggtccttgccaacagccaggattccatgatcaccgatacccatcatatcaccctcatggatctccttatcatcaatccttgtatcacgcacagcatacgtgatctgtccggtcttcacatgttcgattgcctgaagcatagcctcaatattctccgcactgttcttctcgggcacataactgatcatggcagtaattccctgcggaatggtcttagtcggcacaaccacgatctctttatcctcagtaagatcccttgcctggtttgcagcaagaacaatattcttattgttcgggaaaatataaatagtttttgcatttacttttgcaatggcattgagcatatcctctgtactcgggttcattgtctgaccgccctcgatcaggtaatccacacccagttccttaaagatctctgtcattccctttcccacagatacggaaataaagccaacttccttcggcggctgtgctgcttcttctttttcttcctgttctgcctgttctttcgccattttctcggcatcctttataagcttctcctgatgctcctcacgcatattgtcgatcttcatacgtgaaagtgcaccaaaggtaagggctttctcaatagcctgtccgggatgattggtatgaacatgaaccttcacaatctcgtcatctgcaacaagcacaatagaatcaccaagggacatcaggaatttcttaaattcatgctctgtctcctcggacatcggctggttcagaagaataataaactctgtacaataaccaaatttaatatcagcctctgtctgtgcatcgatcttagtcacagcaggaccttttgccttgtcaaactgtgtataatcaatctctttgccaaggaaaccatcatatgcaccatggtatacttccagaagtccctgtccaccggaatccactactcctgcttctttcagaaccggcagcatctccggtgtctttgccagagtttcctccgcatgagcgatcacactctggaaaaatgtatccagatcctctgctgtctccgcaagctctacagccttggcagcagcctctcttgcaacagtaaggattgttccttccttcggtttcatgactgccttatatgcagtctccacacctttctccatggctgccgcgatatcaatggcatccagttccttactgttcttaacacttctggtaaagccacgcagaagctgagaaagaataacacctgagttacctcttgcaccgcgcagggaaccggaagaaatcgccttggccagtgactccatgtcaggctctcccagagaacctacctctgctgctgctgccatgatcgtcattgtcatattggttcctgtatctccatccggtaccggaaatacgttcagttcgttgatccattcttttttagcttccagattcttggctcctgcaagaaacatcctggaaagtattctggcatctatggttttgttattcaccacaagttcctcctctatcctaatcaattgcgcgtacaccttctacataaatatcgatcttatcgatctccattcctgtaaaggcctcgactttatatttgacattgctgacaaggttgtctgcaattgtacttatgttcacgccatatgccacaataacatggaaattcaggcggattttattgtcctctgtaattctgacgctgatgccatgtttcaggctgttctttccaagaagctttaccagtccgtccttcatactgactgcagccatgcctacgataccaaaacattctacagcaacgcttcctgcgtaggttgcgattacatctgtgtcaattatgatctgacctaatccggaatctatacgtccattcatatggttacctccaatgctcattattgtatgtaagtgtattataacctcttttcacagaaaaagaaatataatttttgagttttttcctttttttgcttgcaaaagcacaattcatctgttacaatgtaatctgttgaacacaaggttactgttcagacgctatgcacacagcacgacagtaacaataaagcgtcaaggaggtgctatcatggctaaatgtgcaatctgtgagaaagctgctcatttcggaaataatgtaagtcattcacatagaagatccaataaaatgtggaaatctaacgtaaaatccgttaaaatcaagactgctgagggtggagctagaaagacatatgtatgtacttcttgcttaagatccggtaaagtagaaagagcataataacaccattacccctgttgcaacaggggtattttttttgcaaaaaagactgtccctctgttcagatattctttaccgaatattctgcctgagctgacagtctttttttatttcatatgtcaaacgggatattcgcaatcttctgtaaagttaatgacagaaaagatgatatcccaacaacaggaaaactccggccgaaaccaccagaaccacattttctgcaatcagcatcccgattatcatcccaatccctatgaaaaacagcataaagccgaacagcttttccaattcttctgcacctttttcatcggtttgctatagtctatgcaaaaattatttttctgattcgccgacagattcttcgtcaccttttccggaggtaaaacggtctacaaaatccggaaccatatcaaggatcttggtgagaccatcctgatttttcacattgaccagctttgttgttccattctggatcacaagcactgcacagggagtcatctttcctgccattccgccgccgccgttatccttcttctctccggaaaaagcaccggcacctacaccgaaagatacatccatcagaggaagaatgatcgtatcgcctacatggattgcctctcctaccactgttttcgcagaaataaaactgtccattcccttgaataatgaatttacggtttctttaaaattgttttcatttgccatggtcatgccctcctggttttccaacgttttataacgtattttatatttttattgaaataaatactcactgctgcccgcacaggaacaaatccgtagatcctgccttttgccctgatgtttccatacagataattctcactgtcaaaacggggattgatctgtatacagtttttgtgaaatggaattgtcatcccaagtacagcaagtgccgcacctgtcagcgccggatcttcaaaagaaaaagtaacctgcccttctatccttgtaggaaaaatatgcttaagcaaaaattttccatgtttccatacaagttttctggcagctgtcactctgggatgttctataaacgccttccaccaggacacattcttcttaatcttcccgaatgtcctgcggatattttgcagttttgtacgaatcaactgaaatatatttcggatccggtcatagatcctttttataaaaaactgcctcttctttagactattccgatctgtatcatctgcattcagttcctgctgtccggatatctgactgtttctgatcctctctgtatcagcagatgtatctgaagctgaatttctgtctgttttcagatcctcagtctccatattctctgatttcgggtgatcaaccactgattttttatgctcttcttccctgtttccgtctatgccggatacagataccttttctgcgccggatttctccggatttttcccggatttctttgttacagccctcttctcctgccgttttttcaacaacttgtctacaggaattccaaacagatgaaaggatatctccatctgctgatctttccattccgctctcagcgaaatcccatgaaacagccagcttacgataccctctccctctgtctgtttccagccaccttctgccttgacagctgatgccttatatcttacaggacagaacagtacaagaagaactgccagtaaaagaaggcccagcagaattcccaggatgatcagtataaatttaaggatcaaccataaaatatgtaacatattctcacctgttttctatatattcagctgttgcgaaggttcccgtttccctgtacatttcatcgatcagacttcgcaccatctccagggcttcctctttgcccttcgccattcctatgatcttcggacagattccataaaagctcttctgtatcagcattgctgcaggaataatatccatcagattcacaggattctctgacagagtaaggagataaatgcccagaaccggttttccgctgttcagtttcttttttatcttctcaggatcctttacagattcccctgcaagaaaattctcctgccatttcagcatcttacaccctctcccgtttctataacacttcagttacagtatttccattttctccaaaatttaaaccgggctgcgttgcaaaaaaacacagccctgttctctcgttaataatacttatgctgttttccccaaagtccattgcttctcatctccagatattcctgataagcacgctctacgatctgcttctcgtttgaaaacctcagcagatgatagatctcatgaaatttataatatccggaatctacaaaaaactcctctctctggggcttactatgataattatccgcagtcataagataccagtgtacctctttgaaaaccacgtcctccggaacggtaaagttatattggctctttccgatgtatttcacaatggtcgcacgcactccagcctcttccatcacttcccgcaatgctgtctgttcatgcgtttcgcctggttccactgttcctttcggcaatacccagccctcataacggttcctgtaagatttatacaaagtaagaatcttaccccgatgaattaccacaccgccacagctcgttgcttctatcataatgcaatccctcctgttttgcgtggtattataaactgagtatagtatatctctttttttccaaacccgcaagctataaatatcatttcataacatattaccgattaattagttactgttcactccgttcacagtaacgtagccaaaattcattccagattgcccgcaacatggaatttattattgcttatcataataatacgcatcaaatatctgctctgcgatgggcactgctgcttcacttccggtaccgccattctcaacaatgatcgcaactaccagatccggatcatccacgttggaataaccgataaaccaggaatgactggaaccattctcatcaaattccgctgatccggtcttgcctgccactgtatatcctcttccgttcagagccgatgcggttccgttttccacaacacctttcataagctttccaaggatattcgcctcatttgttgtcatcagacgtttatagctctccggctctgttgtcttcactgtctctccgtctgaacttacaacagaatcaatgagataaggcttcatgagctccccgccattggcgatcgcactggtaatcagagccatatgcataggtgataccaacgtattaccctgtccgatggcagtctgcataacctctgcaacagaagattttccatttaatgtaaaagtactctttttataggaagaaagcggaagactcttattaaaaagaagattctcggctgtttttttcagagaactgcctccgagcatggttccgatctctgcaaatgcactgttacaggaattggcaaaagcactgtaaaaatcttcctgtccatgaacagttccgccatagcacctgatcgtgtgatcttctctggtaatacttccctcacagagataggaaaatccctccagactgcccttggttctgaaatagtccagggcagttaccaccttaaatgtagatcccggaggataggctccgtttgtagctctgttcaacagactgctgtcattggaatcatttaccagtgtatcccagttctgggaaattgtattcgggtcaaagtccggtctgctcatttccaccagaatcttacctgtagagggttctatggcaacaaccgcccctctcctgtcaccaagtgcattataggcagttgactgaagatctgcgtttaacgtcgtgatcacagaatcacccgtatttttctgattcttaaactcatttttcatctggttcaggaaaaattcatgagaagtcagaagctggaagttcgcctctgattccagtccgctttttccattagtgtcatatccgactacatgagcgaacatatttgcatagggataagtacgttcctctgttccgtcttcgtaaacattggtctgagcaagcacctgcccatctgcagatatgatcttacctcttacaaccctgtctgaaaaagtatcctgccttgtattatagggactattgataaaatcatcgctctttgcataattaaagtagatcagatatccgatcatactgacaaagatcagcacaaaaaagcaggataccagtgtatactctctgttacggggccttctcttttcagaaatctcccgggctttgcgcttctggcgcttcttcaactctctgcgccgttccttttcttcgatatctctcaatttcttcgtcctcatcttctctcaaaatatacaatccctgaatgatcgccagcatcagtactgtacacgcgacagaacttcctccatagctgaccagaggaagagttacacctgtcatagggataaatttcgttgctccgccaattgtcagaaatacctgaaatgcatattccgtaccaagtccaagtgcgatcagtttgtagaatggtttcttaatcttaagcgcaatatttacgatcatcaaaaagaaactcatacataccaggatcaggcagattgcaaaaatcccacccagttcctcacagattgcactgaatataaagtcattcttgacaacagggatcttctcaggcgaaccctgacacaatcccattccaaaccatccgccggttccaatggcaaatagtgactggacgatctggtatccttcattctgatataccgccatgggatccttccaggctgtcactctctgacgcacatggccaaacagatgatatgcgacaactgcccctgcagatccgcctgcaagaccaagtgccagatatcccacatttctggatgccacataaatcatcacaagatatgccgcaaagaagattactgcacttccaaggtctctggaaagtacaagaatccccacatgcagtcccgccactaccgtagcctggaccacttttgaaaaatcagcaccttttctcagcaatgccgccataaagaacacaaatgtaatctttatcgcctctgaaggctggattcccatcagggaaagttttgctccatagcttgtctttgcaagcacaaataccgccgcaagcaaaacgattccgattcccgcataaacccatgtcaggtccttgagaaatttcatcttcctgatcaggacaggtacgatcaatgccaccacatttacgcctgccacaatcaccagctgtctggtagctgtggaaacatccagcctgcacagcataataaatcctacactgagaagcatacacatattgttgagcagtaaaatcgatgctttcttataaaaaatcctgtacaaaatctggattcccgcaaaaaatgccatcatttcgacataaaacaacacgacctgaaacttacctgtcttcaggtagatgaccagaaacgcagtgaaatccataaaaaagataagcatcagctgctggcgcagcgattcgtttctctcctcctcactctgctgtttcaccagatagaaacagtgaaaggtataaatcaccatcagggtaaggatcacatacttggataattctacaattacattaatcatatgccttactcggctcctcttttaaaatgtccctttgtatattcccgtttcggagaattcttcccatcacgataaacagctctgaactcttcatatatcttcaccgcatcctgaggcttctcaatggtaaatgcaagtctcagggaagagacaccaagtctgtctatctgtgatttctctttcaacaggccgtaagggatactgttgtaaatgatattatagcagggtatacagaaatctgtattctcagttttccatgggttacatatacatttcgccgtaaattctttatcgtaacggtcttttaaagttaccccttcttccttatgattacatccgtaaagatttttatgcacacactgggccgatatcataagaggcagatatccgtagatcagcatctcgctgtcccggttatctctgtggcggatttccccttcgttcagctcaagcggtaccgtatttctgaggactttctgatctttccagaaatcagcagcttcatcattccatgtatacatactgtgatccagaacacatttctcagccagacctgcctttcgcagaactgcaaaagtctccagatttcttaccagaaatcctgtcattcctctgtccatccactctctgatcctggtgagaagctcccggggcatctcacctctcataatatgcggaagagacagatacatctccattcctctgcttacacagtcatccaggcagacctccatggcatcagcgttcagatacattccatgtatcccctctcttttatataacgccagtgcagtggatttttcttcacaggaaatataaatcggaagatttttctgctttggcaaatctgcttttcttccggcatcctctgataagcgtttcttcccattattttcttctctcttatattgtttgagcaattcattttccagagattccagtgcctctcttctcgcctcattcagcattttcatcgggataaaaatattctcatccatctggatttccagattttcccactcatattctgtatttccaagcttctccatctgtgaacggatgcgctcctctgtcagcggctggttctgcgcatactgtacctcacccacagacgcagatccatggattcccctgcatgacacatccagtatagcaggacttcccggaaaaagaatgaatgttccctgaattttttctttcttttttcttaatacaggactgacatctcctgttttcttctcattgctgaatgccatcatggacggaccattctgcatctgataataaccggtacaggaacctcccctgttaaacagatccagcagatatctcttatcctcctctgctaccctgtaattctcagctcccttctcaaaaagaagatccaggtacttccgatatacagaagttacccctgctgtatatcccggctgcttcatcctgccctctatcttaagagaagtaacaccagcctccagaatctgcggaagaatctctatcgtagaaatatctttcagactcagaggacatagttcttgcgctttccttttctctgaccgtctgccattttccccgcaacaaagcgctgtctggtaaggcagacggcaaggctgtgcacaccttcctctgttaccgcttcttccacccaggatactgctcatcaggcactgtcccgaataactgtaacataaagctccatggataaaagattcaatctcgataggacttgtctcatgcatcctccggatttcctcaagggaaagctctctggcagttaccactctggaagcaccctgttcttccagaaacttcatcccctccggacctgtcacagtcatctgcgtgctggcatgaagatgcatacccggaaacatctccctgatcatcttaaacacacccatatcctgaacgatcaccgcatccagaccttccttataatatggaagcagataatcatacaactgttcagacagttccctgttcttcaacagcgtattcactgtcagataaagtttcctgccatggatatgagcagtatcaatggcacgcaaaagctcttcctctccgaaattcttcgcataggcccgcgcgccaaaggctgctccccctacataaaccgcatctgcacctgcaccgatcgctgcctcaaatccctcataggaaccggcaggtgccagaagttcaatctcttctcttctcaattctatacctcacgttttctataacagtcatcttaaatgcattatttatgagcattgctataatattcaaatcgaatacatatgaaacaaatcataaaggggaaatcaccgaagtaatcccccctctgttatttcagcagctcatcaatctgcttttccagttccttattctttccctccagaaggctcttctgttccagggcttcctgttcatgcttctgcgcttcctcaatctgcatacgaagcgagatcagctcatgcttcagatcatacatctcctgatccttctgctgtaaatcctgttcaaaaacctccgcctgtttctttgccttaaaatagtcatctgtaatattcaggctgataagtgtatgcttggtttccatgggctgtctgctgtaacccggcatagcacttaactcatccatctttttatttatataggatgctactttctgaaaatattcttccgattcatagcctcccagcgtaataatcttaccacctatgattacctttgctgtatttttgaccgccatccgtacgagcctcctgtatcttccttcaatctgcccggaaccccggacatttacttcattatactcgaaagcagtcgaaatgtataggaatttttaaaaaacttttacttttttatatttttacgcccttaacttcagtttttctccggcatctgatagcccagatgctcatacgcaagcgtcgatgccatacgtcctctcggcgtacgattcaggaatccattctgtaacagataaggctcatacacatcctccagcgtaccggaatcctcccctatcgccgcagccagagtctccagtcccacaggaccaccttgaaaattcacgatcatagtctgaagaatccttctgtcaatcttatccagaccatactgatccacttccagaagattcagcgcaaaacacgccacatcataagtaatccgtccatcatacttcacctgcgcaaaatcacgaaccctcttcagcagacggttggcaagcctcggagttcccctggatctcttggcaatctcagccgcacccttctcatcaatctccactccaagaacctgagcagaacggataatgatcgtcttaagctcctcatgagtataaaactccagatgatgcatcacaccaaaacggtcacgaagaggtgcagacagaagtcctgccctggtagtcgcccccaccagtgtaaacttcggcagatccagacgtatagacctggcagaagctcccttcccgatcataatatcaatagcataatcctccatagcaggataaaggacctcctccacctgcctgttcaggcggtgaatctcatccacaaacagaatatctccctcctgcagattattaaggatcgcagccatctcccccggcttctcaatagccggcccggaagtcaccttcatatgaacccccatctcattggcaataatccccgaaagagtagtcttaccaagccccggaggaccataaaacaaaacatgatccaatgcatcatgcctctgcttcgcagcctctatataaaccttcaaagtactcttggtcttctcctgaccaatataatcatccaacgtctgcggccggagattcccctccagagaaaaatcctcctccgtcacatccgtagttataatacgtttctccatctgttacccatcctaacctataacaattctataacaatacaggcaatccaatctaccagagcgtgaaatcctgcttcagttaaaaattcttcagtgcagccttcaaaagaccttccacatcatccggcggcacatccgtaaccttacgcaccgcccgaagcgcatccgcactgctgtatcccagcgcaaccagagcctcaacagcttcctgcctgccatccgaaacctcaccggctcccactgctgccctctcctgctcatgaaccagcttcaattcaaacgcatcctccagcttcatcttatccttcagctcaagaatcagcttctgagccgtcttcttcccgatacccggagccttcgacaacgtcttcacatcatccgaaagaattgcaaacctcaattcatccgctgtaatccccgccagaactcccagcgcagccttcggccccacaccattcacgccaagaagcagcttaaacatctgcagatcatccttaaccctgaacccatacagcttcatggcatcctctctcacactaaaataagtatggaccttcacatcctcccccatacgaatctcagacaaatctgcccccgtcatatatatctcataaccaatccccccggcctcaacaaccaccgagctctcagtcatatccacagccattccatgaacaaacgcaatcatgatacatcctccgtcccaaattcatcacttccgattcatcataccacataccacctcataacgcaaacatatattcgcgtcccttaatcgaaaaaaaagaaccgccatgccttcacacagcagttcttcctcccattactgaataatatgtctcggacaaacctccttacaagccccacaattcgtacacttactataatcaatatgcgcacagaaattatcaaccgtaatcgccccattcgggcaagtcttctcacacttcttacatccgatacagccaacctcacacgcagaagtaacagccttacctttcgcatgagaactacactgcacaaacgtagtctgctcatagggcacaagctcgatcagatgcttcggacacttggcaacacacttaccgcaggccttacaagcctccttatcaacaacagccacaccgttcacaacatcaatcgccccaaacggacaggccttcacgcagcttccaaaaccaaggcatccataagtacaggacttcgcaccaccaccgggaatgaaagccatcatctcacagtcttccacacctgtatactcataattatccttcgtcttctcacaggtacccgcacacttcacatacgccacctgacgggcagtctccacaacttcctgtcccatgatcgctgcgattacttttccgacaggctcaccgcctaccggacatccgtttacaggtgcctcacctttggcgatcgctgctgccagaccatcacagccgggataaccacagccaccgcaattattaccgggaagcgcctcacgaacagcaacttccttctcatccacttccacagcaaacttcttaccggcaacaccaaggaaaacaccgataaaaagacctactgccgcaaccagtacagttgccgcgataattgctcctatattcataccagtcccctccttaaatcagtcctgaaaatccgaagaaggcaattgccatcagtccggctgtcagcagaactgtagggaatccctggaaggattttggaatgtcattgtatgcgattttctcacggataccagccatcagcacgatggaaatagtaaagcccactgctgttgcaaatccgttcactgttccctgaagaacattatactctttctgcacgtttgtaagggcaacaccaagaaccgcacagtttgttgtgatcagtggaagatacacaccaagtgcctgatacagggaaggcattgtcttcttaaggaacatctctacaaactgtaccagcgctgcgatcagcaggatgaatacgatagtctgcagataagtcaggttcgtaggaaccaggatagcattgtaaataatacctgtcacaaaagatgacagtgtaataacgaagatgatcgcaccgcccatgccggctgctgtctcaacactcttggaaacaccaaggaaaggacagaggccaaggaactggctgaggactacgttatttacaatcgctgagcttacaagtatgatcaaaagttctttcataatccattaccccctttttcccttacacatggtattgccacaggctgcacagcttccgccgcaatcaggattacttggatcaatgccacgtttggctgcaccgattttgaatttgttctgtaatgcagaaagcgctgccagaacaaagaatgctccgggtgccaggataaagattgtgatcggttcataaccagccttacctgctgcagcatctgccagaggaaggatctgatgtccgaacagagaacctgcgccgatcagctcacgtactgcaccgatacaggtgatacttaaggtaaatccaaggcccataccaataccatcaaacagagaggcaatcggtttattcttggatgcatatgcttctgcacgtccaaggatgatacagttaactacgatcagaggaatatagattccaagggagtcatacaggcttggaataaatccctgtaaaagaagctgtacaactgttacaaaggaagcaacaactacgataaatgcaggcatacgcactctgtccggaataaagtttctcagaagagagatcattaagttggatgctgcaaggatcactgttgtagtaagtcccattccgataccattggttgcagatgtggtgatagccagtgtaggacacataccaagcatcagtacaaaggtaggattttctttgatgattccgttatataaacgttcagcaggtgtgtttggtttcatcactgatttccccctttctcatactggaatgcacataatccggcattaacaccgtttgtcatggcattcgttgtaatagtggcaccacttaacgcatcgatctgatcatccgctgtggcaccggtctttgtatattcaaatttgtctacgttcttatctttgaactgatccttaaatgcatctgtgtttgctctcataccaagacctgcggtctcaccgatggaaagaatggaaattccatttaaggtaccgtcatcctggatacccattgcaaactggatatctccgccgtaaccctcggaagtggttactgtaaatgcatatcccagttcattgcctgaagcatccttggcaagcatagtctcatctatggactgtgccgcatatccgttctcatccagataagactgcatggcatccgcatccacatccactgtctcaaagctgtccgcatctgcaaatactgccttatacgcatcctgtttcgcctgtgcttcctgctttgcaataggatctgccgtaatatcctggactacaccaagggcaagtcctgccaccagtgtgatcactgtaatggctatggtatctttgataattctgttactcatgcctttttgccccctttcccaaatgccgggtgacgagtcacacgttcgatcatcggaactaacaggttgcagaaaatgatcgcataggatacgccctctgcggaaccgccaaagagacggaagaccgcagtcagtacaccaagacagacaccgtatacatactgtcctcttggtgtgatcggtgttgtgacatagtctgtagccataaaccatgcaccaagcataagaccaccgccgaagatgtggctgaacagatagttcacgtcaaatcccttgcctgttccaagcatgtaaaggattacaaatactgcgaaacttccaatataggtaagcggaatcttcagatcgatcaccttgaaaaccagaaggattgctgctccgatcaggatcgcaagggcagaagtctcaccgatagttccctggatatcaccgataaacatatgtaatacagatacagaactgtctgtaaatccattctgtttcagagctgccagaggagttgcaccggatacggtatctaccacacctctgaagctgtcgcttactgcgaagtctgtcatctttcctgcgaaagagatcatcaggaaacatcttcctgcaagtgccgggttcatgaagttctgtcccagaccaccgaagagctgttttacaacgataatcgcaaatgcactgccaagtacaggcatccagagcggaattgatgcaggcatatttaatgcaagtaataaacctgtaacaactgcactgaagtctgtaattgtgttcttcttatgcatcagcttgtcataaatccactcaaagaatacactggaagcgacggtgatcactactaccagtaaggcacgaaggccaaaattataaattccaaacagtgtggtcggcagaagcgccagtaccacaagctgcatgattttgcttgttgtcatcttatcccggacatggggattggatgatacatgtaacatctgatccattacgatgtcccccttttactttttcttacggcttgccagaaccatcttacgcatagatttgatcatctgggtcagcggacgcttggcagggcagatataactgcagcagccacattcgcagcactccataccatcaaatttctggaagctcttcatgtcaccatgctctgcaaaggttgcaagtcttgcaggaatgacatggccgggacagactcctacacatctgccgcagttaatgcatgcagtctgttcggcatctgccacatcatccttctccaggcagagacatgcggagcttgtcttaatacatggtacatgagtgtcatacatggcaaatcccatcataggaccacctgaaattactttggatacattgtctgtcagtccgccggcagcttcaatcagctctgccatatctgttccggaaaggacatcaaagttctgcggattcttaatcccctgtcctgttactgtcacgatacggtccataacaggttttccaaggataacggcttcataaacagcgattacggtatctacgttatcaactacgcatcctgcatctgccggaagcatggcagagttgatctctctgtctgtgacagctttgatcaggaaacgctcaccaccctgtgggtacttggtcatcagctctgctacttcaatacgtggaatatcttttaccatttctttcagtttcgcaatacagtcaggcttgttatcctcaatacagatgtatcccttcgcattgtcaaagagcttcagcataactcttaagccctcgatcagcttctcagagtcatccagcattcttctgtagtcactggtaagatagggttcacactcggcaccgtttacaaggatatgatcgatcttctccggttcctttggcgcaagctttacctgtgtggggaatccggcgccacccattcccactactccgccttctttaattctcgccaaaatctcctctttcgaaagatcttccagacgtgcaggagtaaattccacactttcatactgctggtcattctcaatgataatggaattgaccatagaacctgttgctgtcaggcgcggttcgattccttttaccgtaccggaaacagacgaatggatcggtgatgagacaaaccccgcagcatctgcgatcttctgtcctgcgagcacatggtctcccttctgaactatcgctgcagccggagcaccgatatgctgggaaagaggatataccatatctccctttggcagatatttcactaccggactgttcttggataattcttttccgtcataaggatgaacaccacccttaaaggttaaaattcccatttcgttccctccttttatattaagcaccaccaaagtgctctatttttgataaaatccatatacttttttgtacatttttatcaacctgtttataatataaaccattttttcaaaaaaagcactacccaaatttcattttcttgtgtataattaaatacaatttcagaaaggaaaaattattaacatgattgttaaaaaaatgcccattttacaagggtttccagattttgagactgttaaatttttcactggaaaattcttccaaaaatacaattttacacctgttttttacgacattgaaaccaccggattatcaagaaattccacgtatttatacctgatcggagctgttggaattgaagatgaaacttggaatttttatcaatggatggcggaaaatgccagtgaagaagagacaattctgagaattttttcacaatttcttcagcaatgtgatttgctgatttcctacaacggggaccgcttcgaccagccatatctggaagcacgatatgaaaaatatggaattccctctccgtttacaggaaaacagtcgctggatctctacctgacattaaaaccgttaaagtcacttttaaaactgtctgccatgaaacagccctgcatggaagaatttctggggatcaaagacaggatttatgataatggtaaggaatgcattaaactttacaaagattttctgaaaaaaagagatgcctttacagctgatgaaatccttggacataacctggaggatgtgctgggacttggaagaatctttgatatgctgggatatctttgcatctatgatggagattatgaagttacatacagtgaatttgacggagacaacctgatcctgaagctgaagctcccctgcacactgccacaggaattttccaatggaaacaccgacttctatctgacaggaaaagacgaagaaatcaatttaattatcaaaacaactgacgggaaactgaaacaatactatgcagattataaggattactattatctcccggaggaggatacggttatcccgaaatctctcggatccggaattgacagaaagcaccggaaagcagcaaccagaaatacctgttacacctggtttacctgctccgatgccttcctcagttctcccgtacagcagaagcaatatctgacatatacgctttcctgtctgattggaactctagagcgtgtctgaaaaatcatctgtgatcatacataaatatcgtcgaaaacaatttccaatggattgtgaagagaaaaagccctctcactgctgactgagaaaatataaccgtcaaattccattatctcaaaaaagcatggcctttctgaggattttccgaggacaaacccatctgctgtgggaaccacttcaaaagaatccaaagggaggctcattcctctgcctgtcattttcatataactttcttttaatgtccagagcgtaaaaaacgccttatctttgtcctccgcagccttgatgtaagcaagctctgaatggtagaaataatgttctgccacctcaagaggcgcattggcatttttctcaatatcgcacccgacttcgcagtctgacagcacacccacaacatagtcccccgcatgagatacattaaaaaaaaggccatccacaaccggcttttcattgtcagaatatctcaggcagctttccgtaagcccgttttcatcgaggatttttctgatgatgatccctgcacccagacttcttttgcggtcatcaggcatacgatacctgatgaccttttctcttcttctgatcccaaccagatccagaagcctttcattcttaagcggatcctcaaaatgattaatattgatcctgtataatttctgcatctgatcaacagttacttcttctgaatatcgatcttgctgtcaaaccctgtaaggctgaatacatcgtaaacctcatcagaaacattgatgatcttaaatccatccttttgagccatttttttgtaggccacgatcacctgacgtaagcctgcagatgaaatatattccagatttgtaaaatcaaataccagacttgtgatgctgtcatcaagtccggacagtgcctcccctaactggggagctgtctgtgtatcaagccatccgctgatttccatagttgctttgttaccttctgtttttgtgataatttccattgtaattttccctcctgaatcaatcaaaaaatgtaagtctgtcaagtgctgcaattgcattttccagatatctgtcatctgtaaccggccatttataatccagcctgtacagaacctgtgctgtaaaacgattgctgtaatcaatggtatagatttcattttcattatgtgaggtataggcgatcagtccggaaaccgcatcagaatcctgaccggtctttgcaaattccttcactgctgcctcaaactcctcatctcttacaatatcaatcctgaatccatagctgcgcattgcgtagatcaggtctgccatataaatatgatggctgttgcatgcatggaatacagtaaatctccggtcggtctgagccagtctcagaactgccagcgcagtagaatcaatcggtgagaattctgccacctcatgcataccgcccatagggaatttacctacagccacataacctctcaggctgcgaaggaatccattggtaatgaaattaatctggaactcaccgtcagagtttcggctcatcagattacctacccggactaccttgccgtccagtccctcggaaactgcttccagaaccgccctctctgccaggaatttggtacggatatattcattggtaatattctgtccgatgtacagatcattctcacagaaaactctggacattggcggaacaccgtcagaaccttctcccgcaacggaaaccgtagaaatctggatcagtctgcggccgttattcttacagaaatcgatcagattttccacaccctgcacattaattctttccagtacatcatcagccgcaaaatgctttacgcaggcagcgcagttaatgatggtgctgaatttgtattctgaaaatcctgttacctgttcctttgaggtaatatccccatccacacagataatacggctttcaaacagctctttgtatggatcatcaaaatagtacatcagcatgttcatcattcgcttttcaggcgattcatatttgcccttacgtacaagacagtaaaccttaccgtcataattgtcaatgaatgctttaaggacatggatccccaggaaacctgtggcacctgtgaccataatatctcccagcttttcctttgtgatccggtctgcattttcttctgtatttgcgctgatcacattctggatcctattatagttataatccgaaaattcattcttgctctgtgcagcctctgtaactccgtcatcatcaaccagagctgcaagttcccgtacagtaggatatttgaaaatatccgcatataccagtgaaatattctttgacagacacataacagcaaccttggatgcagtaagggaagatccgcccagctcaaagaagttgtcctcaatccctactctttcaattcccagtgctttctcaaaaatctcacagagtgctctctgagctgctgtaaccggctctacatagctggcagtgttcgtggttacctccggcattggcagtgcttttttatcaatcttaccgcccggtgtcacaggcatttcctcaatgctgacaaagaaagacggcatcatataatccgggatcagcggctccaggaaggtcttcagttcatcctccgggatggcttctcctgtataataagctgtgatatatttatttccacccttttcaattactgtaacggctgcatttttcaccagctcatgtttcagaagggcaccttcgatctcaccaagctccacacgatatcctctgatcttcacctgtgaatcgatccggcctatgtactcaatatttccgtcacctttcatgcggaccatatcaccggtcctgtaaagacggctttcctgctcacatacagcaaatggattttctacaaacacagatgctgttttttccggaagattatgatatcctctggcaatctgccttcctgcgtgacaaagttcgccggacgcacccaccggaagccggttcagattctcatccacaatgtagctgcgcacattccgctgtgattttccgatcgggatgttgtcatactgtctgtctaccaaaaactctgtggaagaaaccgtattctctgtaggaccgtagccattgatcatctgataggtacggttacggtaatgcttgaatttctcgccgccaagtgtcacaaatttaagagcaggtgcatcctccagaagttctgtaaccagttctcccatctgggtagggaaggttacggtggtgatctctttttcctttatatatctgcttatggcaatggcgtccttacggatactctccggtaaaatatacaggactgctcctgcggtaagaggtgcaaacagatcgatcactgacgcatcgaaacagaagctcgcaaactctgccacaatgtcatccggtgaagtatttctgctcagtgtgatatattcgatcaggttcaacagatttctgtgctcgatcataacaccctttggctttcctgtggagcctgaggtatagatcatataggcaaggttctccggtttcggagaaataagctctgcagaaagttcaaaatcctcagcctcatctgacacactgtccagactgatcacatttccgtcataaaattccacaagattctgatactgatcgatcacaaggagatttcttgctcctgaatccttcagcatatattcaattctgctctgtggatactccggatccagaggaacataggctccgccggccttcataacacccacataggctactgtatattcctttgtcctgccgcacaggatacctgctgcctgttccgggccaaatccgttttccgtaagcttctgagcaatataatcagacattctgtccaactctctgtaagtaaaatctccggagtcatcccgcactgccggtctgtccggatatctggcagccatctccttaaacagatctatgaaggtctttcctgcatgttccggaatatcctccatctgagttttttcctcaaacatcagccggatatcagccggatcgcattcccttaagattccctctgcagtggtttccagattgtcagccagataccggatagtttcctcatggtacatatcccctctgtactcaatctcaaagacaaatctgttcttttcaatggaaatactgacagaaaccggtgcctttgccatgttcaggctgacaggctcctcctgtgcatattccccgccaatggtgtcaaaagcaaaattgtcgccctggtaaataaccatggcatctgccttaatatcaaactcatggctgatctgtgagaaaggataaatatcgttgttcatggaatcgatcagctgtttctgtacaccgcttaagcaatctttggctgttcctgagaaatcgcagaaaacagggagtgtttttaccagcatacccactgtttccgaaagtctggaatcgtttcttccatggtaaatagtggtaaatacagcatcctttttgaaattatattttccaagtgtgataccaaaagcggaaatgaagaatacattctccgtaattccatgctttttacagaattccttcacatcctgcacggaaatggatctggtctctctgtggtaaagttctgctgttggagccgcaccgtttttgtccggatagaagctgatgcttccacctgcatgttcaaatactgacttataataattctctgcatttttatagatatcacctgccagggcatctctgttatccagtgccagatcataggaagtataaccttccggttccagcttctcaccgctgtaagctctgttaatatcattaattataatagccagagatgtaccatcggcaacaatgtggtgaaggtccaggaacagataattgccatcacaggttctgtagatttcaaaccggaaaagctgttcattaaacaacatatatggacgtaccagagtgtctctgttcattccgtttaaaatcggtgttttataactgagcccatcgtttcgtttctgaagtacatttccgttgtcatccataaacagacgggttttcagataaggatgcgcctcaacagtactgtcaatggcttctgccagtctgtccagatccaccttgttatcaagctttaacagatacgggatattgtaaatggcagaacccatatttgcagtacactcaatgaaaatcccctcctgagtgttggtaagaggataactttcctgtacttcccttttgctttcttttcccgcagtttttacaaattcctccatcattcggatagtaggatgattcttaatatctgaagttttgatcacaatgtcaaaggctttggagatcaggatattcagcttaatggcagtaatggatgtcagacctgcctcataaatatctgtggtaatcccaaaatccgtataccccagaacctctgcgatacagtcaaataatatctgctgaacctcattctcaggcttaatgatctccgctgcttttttctcaggcagaggaagagcctttttatttaccttctggttctggttcagaggaattttgtcaatctgcatggtaactgcaggtaccatataggcaggctttgtctctttaataaaatcattcagggcattgatatcaacagtgctgtccgataccacataggcagcaatatattttccaccatttggatcatcaaaggcaactacagtggcatccctgatgccctcatatctgcggatcacttcctcaacctcagaaagctcaatcctgaaacctctgatcttaacctgggaatcctttctgccaatgatctggatatttccatccggaagaaatcttgccacatcacctgaatgatacatcacttcgtatcccggtgtatcatcataaagattctttgtatagacctcggcagttttttccggcttgttaagatatcctctggaaacctgccagccggtgatcatcagctctccgcatgcaccgggaggaagcatatgccccagcttgtctgtaatataaagcttcacattgtcaagtgcttttccgatcgggacatttggataatatttgtccacttcaaatacagtcgtaaaaatagtcgcctctgtaggtccataagcattgataaacttataatcttttggcggctcacatggaaccagtttctctcctcctacagaaagatatctcaggctcttacaatccatctccagcgcaaactgccttcccacctgagtagtcataaaggaatgcgtgatgccattttcctcaaaatagcgctgcagtccaatgaaatccagacggatctcctccggaataatgtgaagctgtgcaccgtttgtgatggcaccgtaaatatccatcatgcaggcatcaaaaccaaaggaagcatatgcagctaccctggactccgaatctatgccataatatctcttgaaccagtgacagaaagcagtaatatttccatattccagcatacagccctttggcacacctgtggaaccggaagtatacaaaaggataaacagatcatgcagctgcggcttcttaagcacaacatccctatcctccagctgccagatctgatctgtaaacagcaccggtcctttatatccgtctaccagaggaagaagctctctgtcagcaatgagaagctttgcagaggaatcctccatcatgtacatcaggcggtccctgggataggttggatccagaggctggtaagctgcacctgcctttatcacgcccatcggcgcgatcgccatatattcacagcgggggatcagaatggaaacaacatcttcactgccgattccctgggatgcgatatattttccaagtctgtcactgatctcatccagttctctgtaagtatattttttatccttaaataccacagccgtatggtcaggaatggtctgtaccagctcctcaaacatatcagcgatggtcttacttctgtcatattcgcaggcagtattattaaattccgcaattgtgtccgctccatttctggaaagaacagaaacttccgaaatatattttgctttcagcagggaatccatagctgcctcataggattccaatattccacgtacaaaggcttcactgtacatgtcactgcggtattctgcagtaagcacatatttatgatcgtattctcttacctggatcagcagaggcatctttgacatatccggagaaaggtcatggcccctggcaacagtatcaccgatcgggaaatcatccccaagctctgcctgatatgcaaataccagatcagaattaatcccgtactttgcacaaatatcagagaacggaaaaatatcatttgccatggaagacagaatctgctcagagagctctgtcatataggcctgtatggtgactttcggatcacaggaacagtaaaccggcagagtctttacaagcatgcagactgtattctccagtctggaatcatttcttccattataaatagttgcaaaaagactctcctcggaattggaatatctgctcatgagaatgccgaatacacctgtaaacagaatgtttggagtaacccccagcttctcgcaggcagaaagtaccagagactctccggtgtccacaggcatcgacagatatcctctctcaggaatctttcctgagcagtcaggaagaggcagggattctgtctcaattccctcgaaaatactgtcataatatttctcggccttcttatattttccctctttcatctgctgttcttcatcaagggcagcatcaaagcctgtgtaggattctttctccaatttctcacccagataggcccgatcgatatcctcaaaaataatatcataggaattaccatctgccaggatatggtggaaatctgtaaaaagatatttcctgtcttctgtcacataaatccccgcccggaacagccgtcccttttccagcttaaagggacgcaccagctcatcttttatcttttcaaactgctcatttgtggtccggaccacctctggtacaaaggcttcctcacaaggcttctgcaccatctctccgctgtcacttaaataaacctttgtcagcagatacggatgtgcagcgatcatctgagaaatggcatctgacagcttctgaacgtcaacagagctttccagttcaaacaggaacggaatattgtataccgtactctcaggattcttcatgcactctgcaaaaatgcccttctgggagccggtaagagggtaaacttctctcttttcataggttctgatcttcggtgcaagcatcacatatttttccagtttctccaccgtattgttttcgtggatatcactggttttcacagtcactccgaattcctctgagatcagaatacaaagcttcatggcactgatagaagacagccccgccctgtaaaaacttgtgtcagttccaaaaaaatcattctccacaacgtctgcaacgatttcaaaaatcttcttctgcataggagtctggggttctttcagattctttggctgtgcagccggctttggcagtgctttcttatcaattttaccattctgtgtcacaggcatcttttccagttggacaaaaacctcaggaaccatataatgagccagggactctgatgcataggcagaaagctcctctgtattgatctggcggtcagccataaaatagcagcagaggaatttgttatctacaggcagagtaatgctggtaatgattccctcataggaattgatcacttcctcgatctcaccaagctcaatcctcaggccgcgaagcttgatctgattgtctattcttccgaaaaattcaatctcaccctcagggctgatccttgcaaggtcaccggtcttataagctctctctccgttaagatcaatgaatacagcctctgttttatccggcagattcatataacctctgccaacgcccagtcctgcgatcacaagctctccggtctctccgtccggaaggatcttattctctttatctacaatatataccttcacattaccgttaggcgtaccaatggtaatgtttctgctgtccgtaattaccttcatggtacagctgatggtagtttccgtaggtccataaccattcataatgtaagcatccgggtttactctgcgaatcttgtcatacagagccggaggaaaagcctctgcacctacatcaaacaccttaatctgagaaactgctttttcaagctggggcagatcgatcatattggacaggtaagtaggagttgtggtcataatatccactttatttctgacgatcagctcacccagcataagaggattcagaatctcctcatcagaggcgatcaccgcagtcatcccgttggtaagtggcagaaattcctccaaaacagacacatcaaaggtcatggctgccatggaaagagaaaccgatcccctgctgacataaccataagtttccgcatttttcggatccggatttacaaaattggcaaggttgatatgttcgatcagcacacccttgggcttgcctgtggaaccagaagtatagatacaataacaaagatcatgctccccgatctttacctgaggattctctgtattctcattctccagaagttcctcgatcagaagtactgtacagggaagcttggcaaacagttcccttcgttcctctgcgatctcctttgttgtgataataaaaggagctcctgaatcctcaaaaatataccggatcctgtcatcaggataatccggtgtggcaactgcaaatgcgcctcctgccttcaggataccctgtcgcactgcatagaaagcacagcatctctcaagaaccacacctacgatggtctcccgtctgacacctttttccacaagtgcattggcaatcctgttggcccgttcattgagctgtacataggtaaagctctctttgccggagacaactgcacatttctcaggatgaagcttcacctgttcctcgaacaattctgttaccggccgaaactcaaaaacaaaattgttcctttcattaatatttttcattttcatgtacctcctaaaaagatattatggtattattcatatcaatcgcacgaatataatccatggattttgataccttcttgacaagttcaatcccatgtatatcaaagtcttcactgtcatactgatattccagagggttgaaattcacaccgttatctctgatcctcagtctgcagagatcatcctccagacagaggttaatgtcgatccagttggaggtttttcccccgaatcgtataatatttacagtcatttcctccgcacacactgcggcaagatttgccttgcttttagaagctccctgttcctggcagaactctatgatcctcttatgaaccgtttgtgcttcctccatggtactcttaatggaaaaatccagattgatccccggatttttgtcaggaacaatataaaagcttgtattcttatgcctgatttttctgaaaatacaggctgcaactgcagttatgatctcagtggcaacaaatcctgctgcaattccgtcgataccaatcccgtcaatctgtttccatacaaggattcccaccagggttgcaggcagaactaccaccgcattctccagaaatgtggcaaaacttgcaatggctgtctcctcaatggactcgtaatagctgataataaacttattccacagataaggtgccacacacaaagcaaagatgcgcagcgcctggaccatatggctgcccagctcgccaccgccgcttccgaacatgacagtgatttcctcggtaaacaacataataaggacaaagatcacagccagcaggatgtaactgtatttcagcatttttttacagagaacccggatgcccacgtagtccttctctccaaaaaggattcctgccacattgggaatcacaccgatgattccgcctgtaagcatctcgacgatcagcagcacattgtcacagacagtaaatactgccataccttcctcgcccagctggttcatgataatggtattcagtccaagcgcctttacaaaattagctgccataaagatcagcattggcacgcctgtgatgattgcttcctttgtgattccaagttcgcccggctttagcaggatcaggtggaggtttcgcttatcagagcggatataaagcacaaaaattcccattgcaaacaggaaaccaagaacagttgataaggatgcacctgtaatccccagaggagtatatctgaggaatatatagtccagcacaagattgatcacattggctgcgataaggtaggctgatgccagctccggatgattctccactccaaggtaattgaccatcatcagtccaattccgatcaccggtgcccccagcatacttacacgtatgtaatctctggtataaccggtcaggacaccgtcacctgataccagaagtctggcaacaggttctgctgcaggaagggcgcagattgaaaaaatgattcccaccacaagtgttactataaatgtggcagaaaacaatttcgatgccccttctttgtctcgtttgccaagcatgtttcccactgctatggaaccgccgataccaaggcagtatcctgtcagctgaacgattgtctccacaggcaggctcagggtaactgcagacattgcctccaccccgatcaggttacttacaaatatcgtatctacgatatttcccagctgaagcgccagagacatcataatccccggaacaatatacttgttcagcttcgcattcagcagtctgttatttctctcttccatcgcttcctctcctttgttttcagttttttcaaaatattgtgccgtaaaactgtaagatatttaaattttaccatttagtgcgataaatggcaagttaataaaaggtgcaagaaggcaaatatagcaaataaatattgcttgaaagtattgttatatttctcctcttctcaaattaatgagtcagacacacaattttctattacctctcatatcctgtaggaattgagctttttgagggatggtgttggggagaagggatgacttgatttggttttttataaatgaagtcaacgtgtctcggaggagtgcttgacttgatttgttgttttatgaattacagtcagcttttcctcgggcaatgcttgacttgttttgttgttttatgaattacagtcagcttttccccggggaatgcttgacttgttttgttgttttatgaattacagtcaacttttcctcgggcaatgcttgacttattttgcggttatataatttaaagtcaacttttcctcgggcaatgcttgacctgatttacggttttataatttttagtcatcttttcttcaagaaatacttgacttaatttaaaattttacaatttcaagtcaatctaactctgaagattagagcgtgtttgaataatgcttttcgcaagatgcgcgtcacaatttgtgggagattttgtccggatgaaagcgtcataacggcgggctacggcaaccgaattcgggcaaaatataccgcaaagtggggcgtgcagattgtgggaatgatttttcaaacacgctctgactcgggggtgtgcttgatttaattgggaattttgtgatttgaagtcacttttttcaattttctaatgatatcagacgcaatatgtacacaacaaatatcatagaagaattgaacctccagtatcggaaagtcacgaaaaagaaaagcaggaatagggaagctcttttaagccctcattcctgccctctgtctattcctccggcatttgtattattaccttcagttatatcatttcaaacaaatatctggctgtcagattttctattatttttgaatttaaaacacattgtttggtttcaaaagtaagaatcagccgatcagcctgataaatatcgttcatttgataagattctattttttgtattgcttttcttgcatattcctgatcatccatcattccttcatgttcccaataaatttcctttcctgtttttctggaaagtaatgtaaaatccggatatactatgccatatccattcaaataaagcggtttctcatatttatagagaatattctttctatacaaataatctgcaattattttttcggatttagatcttaccctttctcccttttcagtaaaaatcactggtactccttctttaaattcttttccctgatattcttcttcataccatttcataagtaattgattccatgttggttctattggtgtcaccaacaattgtctttctttgtgcattgatgtataaattttttcaatttcatcatctgtatagtcctgcagtatttttcctatttgtttaagccttgcttctacttttttcaacacagttctattatatgttctctgtgccagcagtttaggcagctctttattcgacctcggaatataaatttcattattaccatctatacattgataatatcgaggcttgtttttatccctagaaatccgaagatgtccttctggttctacactcatacccatcctggctttatctgcaatttcctgcaaatgtttctgctcctgcaatagcatatttcgtaatccttgcataatcttctcctcttttcttagtttgaattgattaatttgtgattgggggatttatgatttgaagtcgacctagaacgtgtttgaaaaatgcttttcgcaagatgtacgtcacaatttatgggagattttgttcggatgaaagcgtcgtaacggcgagctacggcaaccgaattcgggcaaaatataccgcaaagtggggcatgcagattgtgggaatgattttccaaacacactctggctcagtgcttgacttgattgagtgttctctgatttaaggtcatctcaacttgggaaaatacttgacttgattaaatgttctctgatttgcagtcatctcaacttaggaaaatacttgacttgattgagtattctctgatttaaggtcatctcaacttgggaaaatgcttgacttgattgagtattctctgatttaaggtcatctcaatttaggaaaatacttgacttgattaagcgttctctgatttaaggtcatctcaacttaggaaaatacttgacttgattgagtgttctctgatttaaggttatctcagctcaggaaaatgcttgacccgattgagtgttctttagatttaaggtcatcagttaacagatgtgaatgtaaagaagtttcagaaatgtacaggtttccaggaaaacctgttataagcaagtcccctacccacttcttattgctttttgcaattaaagcaagggacttgcctgatttggttaaacggtattgctatagacagcagcaataccgccatactaacatattgtgccaacaaattgattcctgagcaatcttgcttctaaatttcttatttccgcattgtcgtcacaatagaacaatagatcattctatatagactgtattcatatttaccgcagcctgatcccccatattttacagtctctggtgcccacaactgcatagttatcgtagacagccggggaagcctctatcacaccatcgctgacagataatacatcctcctgcttgcctgttttgccgtcaagaaggcggatatcacctgtactgttgcaataaagaacctttcctgatccatctttgttataaacacagacaggagaagaccaggcatatgaggaagaatcctcccatgctttagatccatcagattttctcagacaggcaagaactccggatgcattgtcagaggtctttgctactgtcacatatatataatcagcaaggctgtcctttccacaggcgatcgtagactgaactccaccggaaacaccgtcatcagtagtacattcataatctgtatgccatacgatctcgccggtttctgcatcaatcttccagacagggacagtggctgtatcatagcttctccatccaaggcggaaagaagtactcacatacaaatacaaatgtcctttttcgatttccagaacaggcgttgagttagagtcatccaatgtatcctggacccataccagctgaagagtattcagatccagacacataagatttcccccattatcggtcataaatacatagcctttataaatcgccgcactgtcctccattccaagccagaaagactctgcactacttctcgtgccatagtagcgccattttacagttctgcccggatcaacggataaagtcccactgttcagatcatatcttgtattcagcctgatcagatacaggattccgttctctcccggatagatcagagtatctgtctctgcatccacaagtgctgatccgtcaaaaaagctcaggcttcctctgagcgaaaactcatcattgtctccaaaagtatacataacactacaatccagcaagtttactacaaatacctttgcagttccttcgttgctgttatatccggcacccacatacataattggatatcctcttggatcaagggctcccgcacccttaaatgtatatcccagatataatgggtcacgtgtcttttctcctgttctcagatccagaaaatacacgtacccatccatgcaggcatagatcacctcaaccagttcatcgtccgcctttgctttctctgtcatattcatatgtgctttgacttcttttggccatttcatcataagcggctgccctgtccagccgcttcctgtccagactgcactgcccgaagaaagagaacctgtatctgcagaccataatttgttcagcctgaaatcagtcatatttgcataaccatgggaaggggcatcgcgaaaactgtttccgcggaatgtgacgattccctccacatctgtataatcctgtcctatattaaagaaaatatcaccatcagccttataatctccaatattttcaagtacatttccatccacctcaatattagtatagctgatcagattttccggttttgtagaatccacacaatgaggctgaaaattaatctctttagtcttttgcatctcaaccacatctttggtttctttaatttctttagtttttttagtttgttcgattatcctgccttctttttccttatctgcacctgaagctgatacggccttcaccttcccgctgtctgttttgctgacagacaggaaaaattggtttcctgcaaaaccaaacagcagtacaagaattataatcccccggtctttataaccttccctctgcattttcctgaacttttctgtgatattgttttctgaatgtgatccggccttgcagactttctcccggaatccacgtttttcttcttgttcatacctttcctcctaaaaaacatatcatgtgaaattcacatataataataatgcataataaagtttatcatacaaacccagataaagtaaccccaaaaagctacaatctgacaacatacaatctgacaacactctcgcatactgctctcacagacacatcatcttctgcctggctgtatccggcacatcgatcagcccaaagcgatagaacattccatatatataactcactccgcggatgtcgcccagagctttgggtctgtcaactacagctcccactttctttatgtttctcaatgccaacagcactgaacttaacgccagactcttgctgttttccctgcggtcgatccatagctcccttgtgtagtctccattccgaccttttcttacttcataggtgaaaggaagccctgtgtaggttttgaaactctcacctgcatagagcaaaataacctcccacagatacttctcgtccagtgtttctctcaacttctctactgcctggcatctttgctgcctttctgctttttcctgcattccttccttttgatctcactcctactcttttgatttgcacttacaacttgtcagcacgctaaagcgcatttgaaaaattatttccataatctgcacgccccaatttatcttcctgattcggacagatatatttatactcatttctgtttatactcatttctgagcaacgcgatttcatgagtccatccctcatcgtcatttggtgtctccagaataaacggaattccttctgtggcaggatgattgatcacgcggacaagtgcctccaatcctatttcaccttctccgattctggcatggcggtccttatggctgccaagaggattcatgctgtcatttaaatggatagcttttagtttgtccagacctattatccgctcaaactcttcaaatacgctgtcaagatcgtttacaatatcatatccaccgtcccagacatgacaggtatccagacaaacacctaatttatcttttaactccaccctgtcaatgatctgacggagttcttcgaaatttcttcctacttctgtgccctttcctgacatagtttccaggagtacaatcgtactctgatcttttgtcagcacttcattgagaatgtctgcaattttactgattcccacctctgcaccctgtcctacgtgactgcccggatgaaaattgtaataatttccaggtgtcatttccagacgtctcagatcatctgccatgatttctcttgcaaaatccctgaggttttccctggcagcgcagcaattcatagtgtaaggcgcatgagccaccagctttccaaaatgattctcctctgccagctgcagaaatgcctgcacatcctgcggatcaatgtctttggcttttcctcctcttggatttctggtaaaaaatgcaaatgtgttgccgccatttgtcaacatctgcttccccattgcaagatatccccgggatgagcttgtgtgatttcctatatataacattttttactcctcttctgtcgtattttcacagtaccagtttatagcaatccttttatcatacattatggactttctcagaattttctttttcatatctgcattatagcattttaacagattttgttaaacatttttacgtcaaaaagactctttcacttcctgtatggttggttggcaaagacggagtcaattgttccaaaatttttcaggttgcgcttatgaactattttcatgtcagcaaggacaataaataggcgtaaaaaatgaaagccgcccctgctgggacggttttcattttttaataccactttacattacttcttataatatgcaagcccatattttagaattttcgtaactgttcagtaccttcacagttacgagtcaaaatccattaaaaatcgccttcggcgatgggattttgacttgtatgtctcgggattttggcatgtttatgccaaaacacctcgcgggatagtagactgctgaatagttacgaattttctatatattttacctcaaatgtgctccagagtaaaccattctttcatcacatcaaaaattcttataagctcctcgtccctgatcacatacggaaccatagagtacatatagtttaaaaatggcctgctgaacacaccccgttcataaccaaactgctggaaaccttccagatccccggaatcatgaacctccacgcacacgcagccacccatgatccggacttctttgatccgcgggtctatgaacgcttccatctcacgacgtgaaaccagttcaatatgacggatcttactcatataatcttcacgctcaaaaatctcaattccctttaaagccacagcacatgccagcggatttcccataaaagtaggaccatgcatcagggcaagtctgtcattatcactgtaaaaggcatcaaataccttatgatttgccacagtgacagcatgaccaatatatcctccagtaagcgcctttccaagaaccaggatatccggcagaacaagatctgccacaaagcggttccctgtgcggccaaacccggttgcaacctcgtcaaaaatcaaaagaacatcatactggtcacataattctcttgctctcttcaggaatgaaatatcatacatccgcattcctcctgctccttgtaaaagaggctccacaataaagcagttcagacggtcatgatactgttcaaatgcctcctccagggccggaatctcagtcggaatatggacaacaccctcttttttttcaaaagcgaaatgataatcctcgtcatcgccaacttccattgccttaaaggtatcaccatgatatgcatgttcaagggccagcactaacgggcgctttcttccctgattggtgttatactgaagggccattttaagcgaaacctccacagcaacgcttccggaatctgagaaaaagcaataatccagatctcctggcagaaattcctgcagcttcgcagaaagcttttccaccggatcatgtgtcagtcccccaagcattacatgacagaaacggtctgcctgttccttgatcgcttctgtcagttccggatgcttatatccatgaatcatacaccaccaggaagatatagagtctatcagcttctgatcttttgtataaagatgtacaccctctgcatccagaatcttatacggatctttcattgttttcatttgttcatagggataccatatcatttgatcttcacctcatcataaaattctgccaatgcatccgcatctatctcaagatctttcgcattatcctgtacttttgcaataaccggaaggccagtcatatattggcacatagcaatattatcctcttccataatatttccgggatggtaatgattaaaaataatacctttcacaggaagggaatgcactttcatatactcggcagtcaatacaacactgtttattgtaccaagccctgcatctgccaccagaatactggaaagttcaaactcttttatcacatcctcaagctggattttgcgttcatcaaagcagagcggacagaggataccgccacttccttccatggtaatatattcataatcatttgccgccttcagaaatcctcttcgcacaacatcaagatccaccggattgccctcaactcttgaagccagatgaggagaccaggcattttcatatacatacggacacatatcatccagagactgggaaataccggacatctcctcgacaaaaagtgcatcgcccgggatcagacttccgtctgtgcgccggtcatttccgctcattgcagctttataataagccagattttttcctgcctgtgccagtttttttacgatcagtcctgagagataggttttaccgatgtccgttcctgttcctgtaataaataccgctttgctcatgattcttccacttccttccaatattccggtgttacatctctgcccatatcagagagcatttttcgatcgctgcgaattgttgcacaggcaacggtagtcagcatgttccctgttattgtagcggaggctccggatttaaaggcggtttccccgtcattggtaagaagtgcccgtccggcagcaagacgaatattagcctcaggattaatataacggaagaaggcgattgtccggaggatatcctgctctgaaagctgatcaaggtgttccaaaggtgttcccggaatgggcatcaatgcattgatcggaatagaatcaatccccagctccgcaaggctgactgccatatccagacgatcctcccaggtctctcccattcctatgataccgccggaacatgcacacattccttctgcctttacctttttcagagtttcaatcttcatatcgtatgtatgtgtcgtacatatattaggaaaatttctctttgaagtctcaatattatgatggtaactggttactccggcttcatgaagacgatgcagctgttcggaagaaagaaatcccatggaagcacagagatcaatattacattccttatgcatggtttcataggcgtggatcgcctgatcaaattcttttccggtcagggcctttcctgcagtaacgattgagaaacgatcaacgccctcctcttcgttcattttacatgcttccagaatcttttcctccggaagaaaatcatagatctcgcaggaagtatggtggtgtactgactgcgcacaatatttgcagtcctccggacacctgccactgcggccattgatgatggaacagagatccaccttatcaccgatatatgcttcgcggatacggtctgctccttcacataattcatctaaatcacaggtaagaaaacaggaaagatcatcctcccttgtaattctgcgcccatcaataatttcctgtgctaaaataagtggattcattttgcaagctcctccgttttcagtctgacatttgattttgaatcaaaaagatattgaagcactaccggtctgacacgctttgcaataacagcacccagaacacttaatgcaatgtcaccgggtactgcaagaagaaaacaataaagaatcagcggccagattccaatcggtgtatcgattacataattacaaatcacatagtaataaaccattccacaggtatagacgatcatcagacctgccagatttgcaagtaagtagcgaaaaactgtcttctgcttaagacgttctgcgataagtccggttacgtatgttcccaggcagaaccctataatataaccgaagcttggcttgaaaatataccagattccaccgccttccgaaaagatcggaagtcccgccagccccagcagcatataggcaaccacagaaatcataccctttctggatcccagaaacagtccggcaagcatagtgaacaggtactgcagtgtaaacggaaccacaggtacagggattttaataaatgcccccgctgcaatcaacgccgtaaaaagaccacaataaatcatgcttttcgttttagtcatttgtaaacctctatgtgttttatagtttactattctaaaacatcggggattgattgtcaactttttatttagaatgttgggaatgtattgactgtaaattgcagaatcgcaaatcaagtcaaacaatctgaggaaaagtatggagcgatgcgcaatagaaattagtgatggtttttagctttacgataaaatggtttcatgatattattaaatcagtactgtggaactatttttatgaggtgagaatctatggaactatatcacgcaagtaaagaaattgttcaatatccagaaataagaaaaacaaaatatacaaaagatttttcatggggattttattgtacaaataatatgaatcaggctatacgctgggcaaatcgtggaatcggtgaaccaattatcaattattatgagtatgtgccaactgaaaatttaaaaatactgagatttcctgagatatctgatgagtggttggattttattgcagaatgtagaagcggaaaaacgcatacatatgatattgtagagggaccgatggcaaatgataccgtatggaattatgtgaatgattttcttaccgggcgaattacaagaagacagttctgggtattagctgagtttaaatatccaactcatcagatcagtttccataccctttcggcaattgattgtctgacatttatgaaaagtgaggtagtgtatgacagaacaggaaagaaatgattatttttatgtgtgtgcattgatagaatacattgccagagagactaagaaccatagaggtgatatcgttaaggcaattggtgaggaagggataaaaaagcttttgtatgatgcggaagtaaaccattgtctcagttttgaacaggtaagtgatgaagtaattagttattatcagataaagcaggggaccttcgatactatatctgactgtaaatattccattccgagttatcttgatattggaaggctttatagtattatgatagaagattgtgcggaagcaggggcggaagtacaggaactgataaaaatcttttcttcctttatcagtgataaaatatctgattttaaaacagacttatattaccagaatccagattatcttgaatggtcttacagagagggaaaattgttggattaataaaaaacctctcccttttgagactacgtgaaattccaaagggagaggactttaaactccccgtcatacatccttattttggtatatccggctcaaattgttccggataaatatcacttccttcatagccacaaactcccattcttggggaattcgtgattggaagaaaacatacgtcattctcatacgcttcaagttcaccctcttccagtttattcacgcactcttcgcaccagaatagatcttcatcataaatacgaaatgcattgatccatgttgctttctgatttccacaaatagaacatgcaaactgtggcggattatttctggataaaatcacaactttttcgttctgcttttgggaactgtaatgatccaacactttgaccataatttctgttgtagaaccaaaatcatattcataattaaaaatcattcccgttgtaagcacttgttttaatgtatgattcgtactctttgccggctcaccccagccaaaatcatcatcaggttccctttcatagcttacaccatcaatctcaaatgcacttaaatgtccgcaacactctacccaaatatcacggataaatcgatccagatcatccaatgttgcattctctttgatttgaataatcagccaatagtctttattatatgctccatataacaataattcaaaatatttttctgttttttccgctttttcgcacaaatcaactcttttcttacacgtttgtaaatgctttgctatccccgttcttgtgtattcttttccgcaatatttgcaaaatcctcttgtactctttgccatttgattatctcctatttaattttatagtctattttaactcgtccaaatgatattcaaaaatcaatctgtccacgttttgttctatagaatctttgcttatatattcctgtataaattcctgtttgcatctttttcaaaaagatgtatgatatagaaaaaacacaggaggtattaagaaagatgaaatctcataaatattggtcactcggtgcattggcaaccatgatcggaactttttacactggttataaagatatgaaatctgcacataaatattttgcttgcagctctcttctctgcatgattatgtctatctattccggtcacaaaatgatttctggaaagtcccgaaaaaagaacgactctacttctgaaaaatctgctgaataatcagaaaaaggagattttccatgtgtgaagaaatagaaaagatgctgttggaaagttcacatgaaacagctgtaaaaaccacaatgcgtatgctatcttccggcaaactaaccattgaagaaattgctcattttactgacttgtccatttatgaacttgaaaatctaaatacataaaaataactccccatgaaacgtatttgatatatgtatcatggggaatcttcggcatactgcattgtattaatatcaaatagttcttctgcatttaatgattgaagaacgccgtgctaaaaggaaccaactatccggatggtgcaacaatgaaggaaagaaatcagcagataagcagccataaggctaagtaaggagggaaaacatggattacaggaacacaccggaaggcagagccgtccaaaataagtatagcaaaatactccatgcttcccgcccggagccaccacataatcatccccgaatgccgatgtcaaatcgcgctatctgtctctttctattctatgctattttctactcatgaatttccaatggaagtccatctggatcatggaaaaatgtcattttctttccggtataatcatccaggcgtaccggctctgtttcaattcctttcccattcaattcttttactgtatcatctacactctcaactttaaatgccagatggcgtaatcccaatgcttctggataatttacacgagctggagcattttttatgataaaaagttctatttcctgtggtccacatgccagatcaatcttgtaatcatcacgttcttttcgataattttctctgattactttaaatccaagcagatccacataaaaatgttttgacttttcataatcgcttccaataattgcaatatgatgaatggtatcgaacataactctctcgcctccgtttttcatatgttgatatatattttctcacattttatcacagtaacgatatatgtggaatagtcatttcatatccacttacattttattttttgttggcatcggaacaaattccagctttaattgcatccctaatccctgtgcaagttttttcaccatactcaggctgggatttcttgttccattctcgatccggcttatatctgcctgcgtaattccgattttagctgataaatctttctgtgtcatattctgctgcactcttgcatcaatcatcgcctggataatatcatattccggttgcaatgcatcatattctgcctttacctccggattctgcaatgctctttttttataatctttatagctacccattgctatacctccgttcataatctgctttatacttctttgccagttccttttctgcctttggtgtcttctgcgatttttttataaatcctgcctacgataaagaaatacagtactcttgtaatatctgatccctgcttggtacgaagctcaaatatcccattctccaatggttttgaatatggctcacgaagcaatggaccgttcatttccagtaagtcaattgtccgcaatgtttttgccagcaacttaggctccagagaatctaatagttcctgcacagggcatcttccatcttctgtatcatataaaatgatctcgtacattagtatgctccttcctctttataattataatatgtcgtattcgacatattatcaagatgattccaaacactttttcatataatattacgcatgatccctacaatatctccactgcatatattcatcttcggaaatcattgtagcttttcataacattataacgaaatactgtgattctctctgaataaaaaagcagtcggggaaatcgtccgtcagtcctcagctgcaggcatggatccgtttgaacgcatgcaggctgctgtagattacatcgaaaaaaaacatcctcgatatcttgcaaatgatggaacttatctctatacttttgccgcggagccgagtgatgaactatggttcaaaagctggcggtttgattcccttacaaccccaacaatcctgtgtgccatagcaaaagagattggtggtttcgacaagataagcaacctttattacgacgggaactggagcgaacactggtatgtatgatccactctcctgcttcgtttcccatggcgttatcctttctgtgttttgctgtcttaagtataccacacattgacagggtaagacaaagatatgtatatttttgtaaaaaaaatgatgatatttctaaccccaatctatccgttaatccgcggcctcatccatctgacaatatatcatactctttgcggtatttatatgcttcgtccgtccaaagacttttgctgttcctctgatcttaccttttccatgctttttcatatattgacaggatgtcagatttgggggactttccttaagatcaccatgttttgagatatctccgcagtcaagtcttacgtactgaaaaaaggagtccaaatgactccttttcccaatgcatatcaattatttttaaaatatcgtatatccgccatctacagccaaagctgctccatggatgaaactagcttcgtctgatgcaaggaatgcaatggcctgtgctacttcgataggttctccaggacgttttgccggactcattccaatcttcattgttaccgcgcctactcctgcattattaacaagaatgtctatttttccgtaggcgtccagagctattttaaccaggttatcaagactttcatcagatgtcacgtctgttttacaatcagaacatgcatttctttattccaggtacggtccggctcattatccatgctgtctttcaggtaccgcagtacatgggcaagacattcctgatggtctgtcccataattataaaaagtgatatcatggtcatggacaaggataccctggtaatcctccgcaacagttccctttactccttcgtgcccttttttcgcgcgggcaaagtacagggcttttccgtctggcgtcgcacatacatatacataacagccttttccgttttccctggcgttcgtacagtctgtatgcatgaccggggaaaacagcatgtctgcataagcagccctgcgttcagactcggtttttaaggcaaactccctgctgagtctactgatcatacctttggaaatgttcagctttccacctgtcaggtccgacaggaactttctgcttttatcaatagcacattggtgtctgacaccaatgctccatggaatttactttttcaagtcggcttgccatataaagttagcatcaacatttaattatttttaatcaatccaatttaattctaatacagtgacctgatgcatgttctgttaaaaatactttatatccttgatttccagatgctccttgcaaagcatttacatgtgcaacaaccggacgatagttattttggggattattagcattcgcattgcaacaaatgattgcctttccagaacttttcacctttaaaggattataactcattttagaaccatggtgtgggacaattaaattgtcatatccaactttccgactattccatacagtagtttcaattgctctataaggaacatctccacaaaatagactttctacacgaccattggtagtttcatttataatttcaattgccaaaccaccgcaattttcttttgtcaatccattttttcttttattttgtccaagataaaaagaaattttccgatctttattcttgctttttacggttgttaatttccggtctttattagagtcccgttttatcaaaattaattttccttttacagaaaggtactttgccaagcgcttagccccaattgcatttttggtaatttctggtgcaatccatgggcaatcgaatacatccttttgggcatatacacatcccataatgtgatcatcatcccaatgagaaagaaatacaatatctggcttaattcttctaaaagcccgaactgcataaccatagcgatttcttttatcatatggatgttctttgtaatggtatcctacatcatacattgcattatagtcacattttgtgttttcattttttccttttatttgaatcagatttccatttcctactttaaatacatttgcagaagaaaagtgaatgtcctttagtaaaatgttcagacgtcctattacaagacgatcctcacttacacttgttatttcttcatcatacttgtcgttaatatcctgcaaatcatgatcagataaagaacgatccgatatatatatcgtatgtttttggtaaataataggactgccgcttcgttctatttcccctttatattctgttccccaactacctttttcaaagcctgcataataccaattgtctttcatattccgcaaacgctgataattttctctattagatgtagaatccatataaataataaagttatagaaatacattcttggattcgtttcctgatcgtcatgagtttttccaaaaagcacttgatcatatgacataatagactgggaaagtatattcagctttgcaaccctagtcggcacctctaattcctttaaatccaatatatcttcattcaaatcatatacactgacccagagttcttccctaagtgtgtttttaaaagtctgttctaattcatctatttctttcatagtactgtttcttttcctcatacattctccgatccgttttcttctgtaatcatcttagtatataacttttttctgtaaagatggattccatgtccgggtctccctgctttatcgttgccagaagtataccataaaaggaaaaaacataatacctattctctttttcttttcggaatttcaggcttactttcatttctacggtggcctctcgaagccctcttatctcttttgtcaataaacttgcactataatttcctgctatattttctctggcttttttcttctctctttccactctatccgattttataattcttttatagatctttttgtgatgctttatccttttgtacttcatagagtctgactcaaatgtctcactacaggttggtaatcctttggtgtcccatgacgtaccagcctttttcttccatgtccggctgccaagcaggaatccgccagactgcgcatccagaatataccatttaccgccaactcttacctaattccactggtgacttggattacttgccttgaaagggatctatgtcctgcaacgaccagacagaaattacattcctaatttctttttggtatttgaaagctcttttcttattaagctgttatttgatgactgagcaaagctataccatgtagcgtttgcatgatatttcttgtaataagttccatacatatttcctgaaaccttcttgccgtccatataccagtctccttccattgcatcccccttccagatgaacttgtggaccagtccaacagacccatcttttttggttccataataataattatccccacacgcattaccagttagctctaacagatattttccgttgtatttacatatacccaagcctccaaaatatggcatattgtttccagaccatgaaatacgtgaggtaacccgttttgcagattttccgtcatacttccacaattctacatgatattgaactttgtctttgttatacctttctgtttggtatgtcaggataagttcgttgatgccatcattattgaaatccaacaacttggcatagcataaacctgtccaaaattggttctgtttatttagctttgcagctccgtatttcttttcatatttttttatcaggcttcgatatgctgccgttggatcctttttattggaagtagttccattctttacagttaccttgcagacgagattataggtatcaccatattgtcttactttacacctgatgtaagttgttcccgtcgtttttgcctgaatggaaccggaagaattgactttcgcaatttttgagttatcggaagaatacttcacgtttgacagatgactaatacctgtacatggaaagtctttttttgagtttatattcagggaaattgaatcgttaataacagcgggctttaaagatccaaggctcttttttgcataattttcaatggtaatattctttatactatttatatttgatttaaggtacttatcggagtctactatcagtgtccatgttgcaggaacaaacatttcctgcatggtatcgtaagcttcctgctttacattgagaacaaactggaataaaacatatacattcaatgcagcatcggtctttccagattttattaatgtaacattttttccataggcatctgcggcagcaatgtaaacaaaatttaatgctactgttttcagataactgtcaactcgcttgttgattcccgttgcaaaagataagacatcctttaccgagataacaccagttacccaggatgcagcagtacctaatgcaaatttttttgcaatagattgcagaactcctttttttaatgaagtagcaagtatttgattttggacaacttcttttgcgacaagggtacttacaccacatccaacagctgcatcgattaatatatctccgattgccctaaaagtaccattcagtgaatgggacatgcatacctggcatgctttttggaggtttttgtcatccgtattagctgccagttcagataagataagtatgtttcctatatcttgtttgatttggtttctgacagcatcggtaaaaatacccaagcttatatttattgcattccctgtggaggacgaaaaatcactaatcgcctctttggttgctttttccagaaattcggtcgttaagtctgaaagatccttatcccatccctctattagctttttagttaaagtatcgtctgccaacagggtgatcaaaacctcttcatattcctgctcccagagattgtttttcgtattgatatccccatatgttttaacaaatgcctgaaagaatcctccaggggtttcgctgaacccaacagccagattgactggatcatcatactctaacaaaggataagaggaataatttgaatttattaaaaggttttgtacttttttgtgtatcgcagaattatcttttgtagtttcttctttctttccatcatcccattcacagacaaatccgctattctggtatccgaaaaaactctcaccattacagtctccgtctttttgaagatcgttccacttgtactgcccgtctattccaccttttggatttctgattcgatagataactaatgcattttcacttccggtaaaattgtttggctcattatttgttctgtcataattcgtatatttaattgtttctcctgtgatccatctgtcaaaaacattctgggtacgttcagcacccagccagtagaaattcttgcttccatggctgataagcgaactgacttcttcctgctcttctttacttgtgatcgtaaccagatgaccgccttgtttttcacagtacttttttgcatcattccacttcattggagagtcgtatactttataataatgcccattccaaacggcatcgtataccgcatccgcagcttccgcggaaagagcttcttcagactctgcatcaacagaatccgtaaattcttcatctgtaccgtcgccgaatccattttcgtccgtaaagacgtctggtgtttccatgttttcatctgatatgtcatccatgttggagttgtttacatcagttccatctgtgttgatttcatcctccgtggcagaaatgtttccttccgtgtcgggagtatttccttccgcagcagcacccccgtcatcaaacaccgcatccagatcagatgcctggatattcatgggaatagaactgcacaacatgatgccggttaacagtgccgcaatgatcctttttcttttcatttgcaattcctccgttttaacaaatatttttcatttccatatgtaacggctgttccgccaatgcatattcataaaatacgaagttttttctcaatgtcttataagaaaagtatattacacagcctcggtcatttcaatgatgtttttgattattttttcttccaccgctgaattatctgaaaaaagcacttgcggaatctgattggagctatccgcggaaaaacccggacacatcggattttcgtattaaaaaatccgcagcagtttcagccgcggatatgtttggaatgtaagtgcctcaaaacatggcgtagtgactatactccatacgattgatatactataagcaacctaataccaaggaggcttatggcaagaacaaatcaggaagcagttacagcttttggcgaggttttgcgttctgcaaacgtacctggttcctacaattcccaaaataatcggatggctgctaatgataaccggctgatgatctattttcagggaatgaaagtttatattccagataattttcagccggatacacttctaaaacttcttcagacactgaaaaagttatgatgaagcgtattgcagaaggagccacccggattttccttgcctgcggattatccaaatattcggataatgcggagccacagatttttgaaaacagatccccgaactggctgctactgtcagtctcagcttcaaactggatccttataatggagactgtgtttttatcttctgcaacagaaaaagagattccataaaagttctgcggtatgatcagaatggattcatcctgacaacgaaaaagcttctggatgatatgaagtttcaatggcccaggacaccggatgaagtaaaggagatctctttccagcaggtggaatggctccttcagggactggagatagaacagaaaaaagcccatcatcaggtgaagatagactatgaaaacagctgtttctgatcttccgtgataatgctgtgaaaaagccttggaaagtcttggaattcagcacttttcgggggttcagataccgtaaaacagtagataaaaatgtcaaaaaatggtatactgtttctatcaaaagtacggagtaaaacagtacttcatagggtcagactctgacatttcgactcaaatattctcatttgtgaacttccagtttttttccgcctaaatcgagtgtcgctatatctgcgactcaaaataattctatttttccgtcttttctccatctgatcctgcattcaaaaagttcatgatctcctcatatgaccgcccactttttacaaccgctgacaggatctcttcttttcttatggcatcccgcttgtctaacagttctttcagatttgctgttgcctggtcatactttttcttcgctgcgatcacatcagcctctgctttttcaatcttttcttccaatgcttccttacttgttttccttgttcttgctatctttattttccttacttattctgcttttttcagttccttactcagctctgatgcaaaatattttatactattcgcatccagtccaaaggctttcaatattactttctgattcgctgttactgcatgatccagacggtatatattgtctaactgacgtaccatttctatgttttccagctcttttattgccgccggtacagtcatatagttcagtttcttatccagttttttcatttcttcttttagttttatatacatcttgcagcgcactatcatggctacaaattcaacaaatatcttcgctcttgctgattcttctgaatacacccggatgctcttattccccagatatgatttatctccgcggaatagtttctccgatacatccctgctcttatacagttcgattgcttccttcgcactcatcttttccgatgtaacgatacaaaaatatcctgccagatccagctctctttctaccacactgcaccgttcttccggtagtataaaagtttggctcttttcatcataatgaaggttaaaatacttctcaaatccaggaccgaattcctttactttattctggtactttttcagatactgcgtcatctggttaatccggttttcaatctctatccgttctgcgctttcttttgaaatgctatgatacaaatgaaaatagcgctttttttatcacttgcatacagtttgtgccgtattgtctttccgtaaactccatattcatagatattgttcacccgcttattttcgaatgtccctttattttccaggatcagttcattcacaagggcagacatccctttcaccatgataacaaaactatacccacatttatccatatattgtatgttcttacagctgaagtatcccctgtccagaatgaatccaatcttcttataaccatatccggatgctttatccagcatgaactgcagctgggagatagcattcagacttcctggatatttttcataaaataatggttcctgattatgagtatcatacgcaactgcataattaaataccggctctcccatatctactttcggatgcccaaattcgaccatttttatgtctccagcctgacagtttttattcgttgaatcataagaaatataaatcttttcacggtaattccgtaactcatggatcataaacccggtcatactcatactctatatatacaacatttgacttttttctccgtgtgatcttgccttttacggttggtactttcactaaaaaatccagatacatagctccctccttttaggcggttatccgtctaaaataggcgtactatatttcccagttatctgcaatggaaaaccgcagaaaaccgggattttttatgattttatttcgttcttttttctttaggtggaaaaattactggatgttcacatgaattaggggtagtttaactcaccatcatttatttttcatcttctgaaactcccattataatatttcttaaatcttctactttacctatatgatacaatgttagtggtttaatattagcttcataatgatcttccatttttccgataataggctgatcacgatgtaaaactattctccattcattttgccaccgatacatattatctttaataaaaaatgattccaaataatcataacttgatgtatctttattcatcagattaatatcatatgtttctaatatattcttataaactactttatcagcaacccaatttgcgcctatatcatgtgcaagttcatctaatcccttctgcagttctatcttataaaacaacagataatacgctccaaactgttccatttcggatataaactcttctttaaaacgccattgtgtatctgttatcttaattaatatgttctcatcaacctgtgtactgcaaaataacggaattttatcgtcacctgaaaatcccatcacaaactctgtgatcgtctctaccggaatctcaattcgattttctggcttttgagaattagctagaaccaaagaagccttttttatttcacttaaattaataggacattttccatcaaatttatcaccacgatagttatcttcaagtttacgaaaatatccactttcattcatatatattttcccgtcacatatatcttttaagtattcttctttactactgactttaataagcaaatcagcaacttcatagccaaatatattccttttttctgttatcatttttgatatctccaatttatcttccgttagtccttaatagtttaacaaaaatacaatacaatgatatttctattgacatagcacttctgaaccatttccaatctatatattaacgtgaacttcctgaaaaagtaacactcaaattgccattttctcatcaaaacagtccaaaatctaatttatttcgccctcagaacagataccctatcccaagattgcttctcttgaaggtttttatcctttatatgaattctatcgcatctatagatttttgagctccttctttttttctctttcactgaagtaaatttccatttcatacctcagtatctcacactttttctcacgaatataattgttaactaattttcttagaaaaaataataacattataaacacaatcacaaataccaacaacactgatattttcttccagctatcctgcatataaaattcagccaatatatttatcaatccagaaggtacaattgatattatgtctattagtcttgattcccaatctttgttttttgcatcctctttaaccttttgggtaagattctctagttttttcttaatttcatatgattcacttgagttgcactttattatggaagttcacaagattttctggcagaaaatccctatttttcaaggttttttacaatctgctattttttgagtgttactttttcaggaagttaaggttttaatatcgcttctttccactagtcaaaatggaattgcctattttttcaataattctattctctgaaagattactgcaatcaaaggaagcacaacagaaagaatcaatatcattttattaaaaaaggtggtacttacagctccctgagtaattatatcgtttctctctttaactaattgactcttttcttcttgatctgctttctgaatctcactattcagttgatttatcaattcttttttcttatcatgcataaaattcatcaatgtgtgtaatggtatatatgccaaaactacaatcaaaaaaacaacaactattaacatcaatgcattagcatcattggcaaatgcattgactacattgattggcggatttgctgcgattttatcatttaaaatgaaaagaacagaacatacaatataaaaaagtccatatgaaaaattaactattaaaatatccaatgcttttgtaatactcagattcttattataatcttcattgttatatattatatgtccactttttatacaccaatatataatagccccaccagacaaagccattcctaatattgataaagagtggtaccatgttatccccaggaacaacgtataatatactcttgccataagccccagattatgcgaccatatcccgggattgctccttgctgtcgagtaaaatccataccccactccaaaacttatcaaaaagaataaaaaaacagaaaaaatatattcaaccttttttcgtaaaactgttttttctttctgcttcatcaaagactcaaaatctttatgactaattccaacctcaatccattcctcaaatttaaacggaaaatatgaagaaagaaaatacgacaaaaaatatagcattgacaatcccatactattactcagatctcttaaatatgacaatgtcattttacctgcgtttccctgtccccataatacatttacctttatcataaaaaagagattaattgcaaagataataacaggcatcgctatataaatccaatttttccatatagcatctgaagtttttttatgaaaatataccacaatatttgcatctttgcaaaagttaaacagttttacatatcttttaattatattatccttattcatacgcatctcccaaacatccagcatacaataaatctaatctttatacaagtaattataaatcagaaaaataccaatgtacattgcgacccctgcaaaacaactacgctaaatattgcctgcacaggcatataaattattaagttaaatttcccttcgaaagcactgaatagttacgaattttcatcaaaacgaatattcctaatctcagtaaattcatctttacattcactgaccagcttccaggttccgattatattggcctgtatgtttcttctgtagagttctctggcaattctgcatccgatcatccggcactgcagcttataaattgcctgcttctctgtatccgttttctggatctgggttttttcctgacatttcgtcaaactgttcaataaaggagtaagtttccagtccagaggtatttgtacagcaatcagtaattcacaaagtctccagacagcccggctttgatataattcattacttattgtcctgtatacaattactgaaaaaaggatttccgaatatttggataatgttatattatcccgaatattaaactgacgctgatacacatcattatagaaatcaataaaaagctccagatcattttcatcacatagccataactcctgttgaaagtcatcaagtacggatttctcttttctaacaaatactgcctctaccatatcaattgccgcgggatgactatagtcgtctttcaattctgcaaaataatcagtaattgcttcatattctgtctggaacagttcacttccagagttattctgtaaaaacagacattccagtgcaataataaaactctgagaaattcgcaattttacaacataatacccgaagttattccattttttgctagctgttaccaaatcctttaacaggcggaacaatctctctatatcaatcgtttgaatagaaagctcttttataacatctatcagatattcatagtgatgctgattacctacaaactcttttgggtttgattctttttctattttcttcagtgtatcttcatacacttcatttttcttttcactgtatttctgaggatcaaaccgatataaccaccatttatcatatatatcctgagagttttctattatccgacacaggtagtttctgtcttcgtcattcagcacaattaatttatctaaactacgcaaacgattaattgctgcttcgctgttcttatcaggatcttcaaccctttgcctgatctggtacatagttctgttatatattttcaaatcaaagttttgcttttcgtttggtatatctaccaaaaaaaccggatcataataccctgtcgtttggtctcttcccattggtagctgcagaagtttttccaatttttcattttgcttttcaacggaatatgcactaaatataccccggaataaatttcccacttctttaaacatgattgaagcatcactcaggcacagttccacagctttgttatataattggtcaagcatagattctgagcatttataacataagcgggagagaatgatgggaagtatagctgcagactgatcataaatggatctgctccaaaatgaatttttactttttatattctggcttacagtattccagaaagtcagataatccgttgtaatagcatctgcatttttctgggtcaattcagctaaactggctctgccaaacagaatatctacatgtttactatctcttgcaatcaatatctgcatcagtgaccaatgggaataatagttggccaaatagcgcagggaagagaataatccctttgtattacttacgctattcacccgaaatggatgcccggtcagctccagaaatctccaatattccaatgcataaaaaatattttgattattctcaccaaagttcatggtaaaggtagtggataggtcaaaattatcgttttcttcaaagcgttccttcggttcgttaatttcgtttaaatgatagcaatatttatcattttcattccaccaagagagaacattgtcatttaagcagcattccagatcatcagatgatattttccagtttccctgtcgaatataattgatcaatgacacaatactttcttcaacagaaaccaaatattcattgtcattttccttgatcaactgcttccttacctgaatcaatgcaccggtcaacaacctctcagcctttgtggtctcaccaataaatgcatacatatttgcttttatcagagcccagtaagcatctccgcttaaaagcttccagttctctaacatactggtcagttcctttgcctcaaatcggaaaagatacttccagcaatcacatgcatataaaaactgtctgcggtcataatccagtttttctttttctattttttcataacactcatcatacaatttccattgggcctgttctctgaaagcacgtagtagctgcagatatgtttcctgttttttgaaaagacattgggctttcttctgtttctctgtcggctcttctgcttctgtgttcacgattttccagaatctctcgacatactgaaatagcaatggtctaccagcaatatccataaagcggacaaactcatatatataattaagctgctcttcatatggaagactttccaaatcgtccatatttgagaattgttttaaagcataatcaacttttgatttcattttccatggcagaaaaatccatcccggataagaatcattcagctgtttcatacaagctgtctttttcgttatttttgaacgggtatttacatctaatttctgataatcaaaccagttgctttttttctggtttccttctacatcagaatttaattctttcagaaaattacccactcgttcctcaatgctcttttcaggccataggtcttccagatcaagtacaataatatttcgatcaaaaagcagctttcttttagattccgggatatgggtaacggataccatgtagatcatctgcgaactacttttgccaagattatcatggatccaccctatccatttaataaaattaggatcctcacaggaaaaacctaacatacaaaatacattttccagcattgcctgctgaactgtattcaccattgcagcaaaacgcacaggatatgttctgtaatcctcttccgtaataatgaacggacgatgtgagggaaaagaaccatgaagcttaacaatcctgggatattgattgctgtttaccagatcctcctgacagtgcacaacattatatctgcgggtgctgactttatcagctgcgcgctccagcaaagtatcataattagtggtaaatacatccctccatggcagttccatcaactttacatacaaatttgacggagcataatccagatccggcactgcttcctttatgattttctccaatttcggccgtccaaacataatctcaacttcctgcgccagccgcagcgaactgttatatgcttttccgggactttgagaatcaccataaagttgcttgtaaaacagatcagacaattcgttccagttcataaaatacttatctacaacagatatcttttctgcattttttgaaaaccctgctccaatcatcaaaacagcatgcttctcagccagagccttggagatttctctcatatacgttttattcatatttttcgattcctcatactctccaatgtaaataccgtatccttgccaaaacatgactatttccagttgaatacagaaaacgataaaatccactttttaataagggtgtcggcctattcgtccaacaagtactttctcaccttttccaacatcctcatccttccattgaaaataaattcttaaatctgaatcaggacggttcaatttcaaatgaggttcacacaacactgacttatgatgatagacactttcttctcccattaatttttcttcatatgtaaatgaaaaatataacgattctctatgattaggatctgttgaacattcagtaagttttgctgtaagaattctcattgcctgtttcaagtctgttctatattcctgatataatctaacagcttcatcatttaatactgaaaggcattcagtaatctctttcgtattcgtttcaaagtcactaatatatttcatctcagataaaatgtcctcagaaaaaaactattcttaaaacaagaaggcataaaatccacatatacttctacatttgaaatatcagataaaatattttttcttgcttttatatactgttttttattatatgctgcttcatcatattcttgtatgatgtaattatattaacttcctgatgaattaactctcgactgtacgggaaccttataataatggatttgtgactgttttataagttaactctcgagaggtaattaattctcatatcattaactacatatcttgaatgaaccgcataaataagccattcttttgaatcgagagttaattttacaggaagttaaggtttaatccaatgccagttgcattctttcctccattgttcggtcaccttaatggagtttgagccaatatgcttctgacaagaactgtttttaagtatctacatcaacattgctgaaaatatcaaatccacccaatccttcttttgtattttgataaatatcttttataaattttgatagaggtcttttcccaaattcgtctggattcgcataaccaccatacagcaaacgatataattcatccttactttgaaacaatgttcccgtatctttaaacagacattctatatattctgggctataatattgcattttcttaattatttcctgagcaatatctttatgtcgattatatatctcctctaatcggagcttttgagcatcttctaaagcctctttactcgaagattttatcttaatttccaactcgtgttcattttccatatagttactgccgagaatattatattcaaatgaaatattatcttttttattgtacatcaaatatggatttactttaaaaatcgtattactttttattctattacaagttccacagaccggaatcaaattataaagcgaaaccgcaaacatcggaaattcatcttttgaataaaaatgatccaattcaaaagttccaacaggattcctgccatttctatttttaacaatttttaaattttcaataaaattcctgttgcaataagggcatacattctgtcccacctgtttataaattaatagtttagcttctttgggcatattctgaaacaaagtgttaactatataattacgttgttttacagatgatatatgtttaaattcctctttcacctgttcataatcagggctatccttcacccaaaaatgtaactgttttaatttttctggcgatgcgcagacaatatcctcaaattgcattttaaaatagtaatcacacttttcatctattttttcgataaacctcttatttcttgattgagtaattaatttataatactttttctcaagattctcattcttctgatactttagtggaatcactcatttcctccatgattttccttctcttcaattcaagttgttttatttctttatcaattgtatcaaccgccaccatctgtcctttcgtttcctttaattttttcagtagctgttctcctaatttattcctgatcaatgtatcgcctatacattcaattttttgtttataactattataaacttcctgattcaaataagaaatctccctaatttcttttataacatcttgaatatatttctttgcaaaccttcccattgaattgcaatccaaatagaatgcatcatcaagaatctcatacagatttgtcccgaacgtttccttatgttctgaaatatccacttccgttccattttctgttttttgcaaatatataatattggatcttggaaaattactaaggcaaagtggcgaatgtgtagtcattataatctgaacgttattttctctgtaacaattattgatatacgttacaagataatctacgaaatctcgttgccatgcaggatgtagacttaaatcaatctcgtccagacaaataagtaaatctttccttgtatgatgctcacttttcactatatacttattgaagcaaccaagaaaatatatccatgacattacattttgaaacacacgctctcctgatgaaaacatcaaattatctatgttcaaatagcggagcaaaaaacttccatattgtctttttccctggaaaatctcctcgtttatttttactctatcagaaacatactgtataattttcttccactcacttgcctttaatacattttcccttgaatattctctcgtctcttttcctgatttataagctaaatcctttttaggaacgtcattcttaatcaaaggaattttatctaacaatttcgcaaattcttttatctcattcgcagcatcacaaaaatataaattattcgtagttgatatatctttcgtagaaatatcagcaactattttggtatatatcacttcgatatcatcatccgtacttaatatttctaatccattttctaaaacccattcaaatacaaaattcatttttaatacataacttaagtcatccttcactttatcaattatatatttagagcgcaaaacatctaaaacagattttacagtgtccaataaactctcatgaatctttccatcaagcttcgctctttctattcttgcaaatactggtgaaatattcagtcttatttttgtctgtacaaatccttcataatcactgataaagtccgtatcaatcaagaaattataaaacatcaaatcacatatctgttgaaattcatttggacttttattttgttttaaccaattactatatctttcaaagtcatttaccttttcgccatatgccttttcaggatatataaattcaaaaaatgcacttgaaataaaagataatcttgctggagtaatcgccaattcgtccaacttcccattgaacaaaatcgctgcgcgatggcctgccaaggctgtggcgcagttttatttttattaaaaaagcagtggaattactttccataatccgttattgttaagttaccacacgaaacaactgaactaagaaagctccactgcctatgataagaataacattttccagtctcttccgcaatcggaattatgacgctaacgcacctccgaataggtagatgtaattattaacactatttattctggaggttttattatgtataaagatatttttgaatccatccgcaatgaagcggaaaaacgtaacctgcgtgaaagaactattcaactgtattgctctgatgtcagttacttccttcgttggattggaaaaaatgtttctgatcttacacttgaagatgcggaaagttttcttactgccaaacgtctggaaggaaggtctcctgaaactcacaatcactatcggtctgcaatcaagttcttatataaaaaggtgctgaagattctctgggatgatgacactgttccggctatgaaaagagagcgaaatcttcctgctgttctatcccgcgatgaaataaatgcaatcattgacgccactccgaatctgaagcataaagcgattattgcaactatgtattcttccggattacgtgtatcagaggttgttcatcttcattatgatgacatttcacgtaccaacatgacaattcatgttcgtgaaaccaaaggcagaattgacaggtatacaattctgtctcaaaaaaatttagaccttctcacagagtattggtacaaatgtggtcgccctaaagatatccttttcccaagttcctggtccggtggatatcttgatatagccagtgttaaccagttctttaagaaaagtgctaaactcgccggcattaaccgtcatgtttcctctcatgcgtgccgtcatagttttgccagccacctattcgaaagtggcacagatataaaatatatccagtcacttctgggacatgttgatcctcgctctacagatgtttaccttcatgtgagcaacaagacacttcttggaatccgcagcccgttcgacaacccggaaggtggtaaatcatgagtaaggattgtacgattcaggatgtttttcatcgtttttatccatcttttgaatccacacatagtatttctcccgctcagcgaaagaccgcttatcacatcatgaattgcaaaaccggtgcctttggtgtgaatgtaagcgtatgcgaggactgcggctgcatgtcagtccactataactcctgccgtgacagatgctgtcctatgtgtcaggagtttccaaaagaaaaatgggtagatgcacggcgtgaggatatcttagatgctccttatttccatgtagtttttacagttccaaaagaacttaatcccattatctacagcaaccagaaattcttatacactgctctttatcatgcggcttcagatactctcagtgaacttgctgctgatagtaaatatcttgggactgatatcggctatatctgtatcctccatacatggggaagcaccatgaattttcatcctcatatccatgcgattgttcttggtggagggctggatgtgaaaagtcattggaaagacaacgggaaagagttttttcttccgattaaggtgatctccaaaatatttcgtggaaaatatatggctgaacttaagcagctctgggaaaatgacaggcttgaatttcatgggccggctgcaccttacaaaaactactatactttcaaggaattattaaatacctgctatacaaaggaatggattccttattgcaagaaaccatttgacggtgccgaatctgtcatcagataccttggaaaatacacccaccggattgctatcagcaactaccgtatcaaagacatgacagaatctacagttactttttccgctaaagattacaaaaaccaagggctttggaaagagatcaccatatccggcgaggaatttatccgtcgatttttaatgcatgttcctccaaaacgttttgtacgtatcaggcactatggtcttctttcatccagaaataagaagaaaaagattaccctatgcagaaacatccttggttgcaaaaaatatatttccaagctgaaagatatggatgcacctgccattatccgtcttctttataataaagatatatgcaagtgttcttcctgtggtggtaagattattcctctgcctacagaacaacattttataaaaccaaaaccacatatgctctgttaacgtatcataactgtatatttttttagcttccttagggaggcttatttctggtgtcataatacaggactgaattataaattctatgtgtttctatgtgtacacgctatcctattataaatagagtgtcataattaaaagtccatatagagttgacgcgctttgttcaaccagaaaaaatcgaaattgatgcaaacgaaagggcagttaatgaaaagtctccatactgctttttcgtttgcaccaccttcgattctttccttaacgatttgttcccattccattgatatcatcaaaacaactattcgaaatgtaaatcttggtaaatccataatattctgcgctagttcttataaattcactcgaaatatctggataatcacttaaataaaaaatactttttataatttctccctgaatttgaatgtttttctggtaaatattagtatataaatataactgaccatcttcctttttaagaataatcaaatttttatttttctcgtttttgtttttattaaattgttgatattcttcactatcctcattcttaaacggatagcaattcaacatccatacctcttttaaaagagttgtctttcctgctccattatctccaacaagtactgttatatttgatataacatctgaagaaaacacattatttccttttttccttgatattcttaattcataactttcatcttccaatttcagcattgaaatattatattccggtgaaaagcaaaaaccctgttcatgaatacatttctttttattaatccaataataaaccagttctataatactctccatttcattcagagaacactgcttttatgttttctttttattcagcctccatagtgtctacacctaatgccgttatactaatcatttcgccattttctattactgaatctggccatacgattaatttcaaatattctattaatttacttcttaattttttcagcacaatctctctggtttttttatgcatacttaattcctctatcttcaattcttctataatctgaagtaaattagatatatccatcttaaaaaattcattcaggtttttaaagctataaatactatctatgccttctattaaattatagatttctgcaacctttgctagttttaattccgctataaacgactctagatctatataactgaagaaggcattatccaaaatataaacatctctattatccttacatttgttttcaaattcttcattccaacattgatggtcgcacaaaaatctattatcacttttctttttttctatttttcgattatccaatatcgcaaacaagggccctgcaatttcattatatttagtaattaactcaccatcattacttaatatttcaaagcagcttcgttcaaatttttctggaactaccttcagcttattttccataaattcaactgtctttttataatcgacacagtcaaatccattttcttctatctgtatgaaacaaataattatatctttaaaatatctcggatcatatttttgttcttgtaattctttatatatagcagcaactgttttctctatttcctcatcttccaattcccaccaataaagcaaagcgtcatattttaaagtattttctctttcttttgaatcgtctatttcttttgctcgattaacaagctcgtttagttactttttactcaatattttgctcctgctttcccgttttttcaagattttctgccaaaaaatccctatttttcaagttttttgcaatctgctattttttgagtgttactttttcaggaagttaaggttttaaggagattgtagcagaataaaaaacaaaaaacagatacggatgattaccgtttacaatattcctatggcggtatttttgtaaatagtagggcagagaaaaaccgcaggtgaaaattcctgcggtttctattttctaagctgtatcggtattaaactgccttacaattatgcacttttcttctctgaagctatcttttcgacttcctctatggttagctctgtgtatgctgcaatatcttcataactgagtttgccaccatccagcattaaacgggctatatggactgctttcattcttgccgcttcatttctcatatcttccatcgctttacacattaccgccacccctttctcatcttctttaaaataatgcacacggttagccagaacttcataatacatatctttcgcatttgtacaggaaaatcatgcataagttttcccagtgctgtttcatcctttatctgtgagttcacgtatataatatgcgattcatcattaaacatctttccggtttccctgataatgcggtcaaaatgatatatcgggagattctctcccagcacatcattttctgtaataaagatcacataagtttcatttaattcctgatactgatcacccggctctgtcacattcgcatcaatcaggctactattatatctggctctttttacacccgcacctttattattcctttgaatttcgatattatacacccggttctgctgatctactgccagaatatccaatctgaccgatcgcccctgtaagttttttattgcatactgactggtaacacttatcactttaaggtcattacgattcaatataacctgcaataaaaactccgcacatttccgatcttcaattttacagatgctttcttgccttcatcgtcacatagtacaccaaaccgccgagcactccacctactgtattgtagaagatatccgatagctgaaacgtacctaatctaaacaataattgcagcatctcaatgcttaccgaaaagatgaacgctatcttcccgctataccacagtatcttcttccaaccgtttcctgtcttttcttcgaatcttcatgggtcgagtagacgcaccccttgcggtcgtacgcccctcacagaatccggacttgcggctttcccgcatccggctctttgcgaaacgaatcgttcacatttatcaattatatacactgacatatattcggggtcttaccaatggatagctgttatctatcatattcagaaattctacccagttgtagcttttcttttgactcctccgatttagacagtagaataaacttttcattacgtggtatcgaaatgctgttattctttctgtattgtctgtgattccatagtaatggtaataaccagtcagtatctgattgagtttagcagtaatctctttcagtttccatgttttcatgtgtcccatcagttgatttatttctctacatttcttcgcaaacttcttcttactggttttcctcttcactctgaatctaccattcttgcttttggaacagtagtgtgtaaaacctaggaaagtaaaggtacctggcttcgttccacttttactgcatctttcctttgcgtatcgtccgaactctatcagcctgctcttttcttcttcaaggcttaatccaaagtgtcccattctatgttttaagtgttcatagaaccatactgcatctgatttgtattggaatgtcaccacaaaatcatcagcatagaccaccagacctgcatatccctttaacatcggtgttaccacctctttgaaccaccatatcagcacatagtgcatatagatacaggaaattatcggagagcagacggaaccttgtccacttccttcctctgttgcttcaaattcatagttattcataattcctgctttcagcattcgtctgacaaggcggatgatattcgggtctttgatccttgattctataaaacgcacaatccattcatggtcaagatgctggaagaatccttttatatccgcatccagaacataattcgtcggtttcctttccagcattatgtttagtttgcggattgctttatggcagcccctgttgggtctgaatcccatcatctcatcataaaacattggctcgaatactgcttccagtatcctgcgcagtgcttcctgtaccagcttgtcttcataacagtagatactaagtggccgcatcttcccattgtcctttggtatttctaccagtcttgctggtttaggcttataggatttcttcttcaaactttctataagggcttctagattttcttccagatttcttccgtattcttctttggtaactccatctattcctacggctttcgttccatccatctggacatgacagttctcaagcatctccttattgataagatgccccagtgatgtaaagaccatgtctgggttttcttttgataattgtgatattctcgccaatttcgtttccattagttcccctatctctgtgtatagctaatgtttcctctttgatatagtttcgcaggccagaactgcgaggcacagttctctctcgacttccctccagtatttattttgttcataccttcaccggtactgttcgggcctccgactacctgcacttcgtttgtctttcttcttttggttggcggacatacttttcatttacacactctgaaaagaaaatgcaggtcctctccagttgacatatagtccctgtctgacatgaatagtttcaacaacaccgcagaggcatgcaaaatctcaccataacgataagtgcatatattgtcttccacccagaccacggtgtcgaccctctgatactttgggatttcggtgctccatagctatccctgctatcttgctgtctacgcttagcctgcacgttaccgtaacagactcaagactcgcttcaaatgctgtggttaacagcttatttgatggggcttccacccaccggactatataccctttgctggacgcacagtctgaccccaatgtggtcaacttaagcccagaatgctgaaaattcaacgattctgggcttatattctggatttttttatataaatatcttgacatatcctcctaaatatgtggtttatagattaagcaatattacgttaccagcgaaatatttatctattccaatacgtaggaggtatgccatatgagtcgaactaatatttgtaaaaatatcgtccaatccattaaagattatatcacagatcaagttaaactggaaccccatcgggtggaaaaacattttgtacggcgaagaaaactttcacttttgcaagttattatttatctgttcttctcttcaaaagcttccatgttccagaatctttcacagatcagagaagaactgggcacgctttcttttccggatgtttcaaaacaggcactttccaaagccagacagttcattaatccttcactgttcaaggaactttattacctttctgttgatctgttttacagccagatcccttcaagaaagctgtggcagggttatcatctttttgcagtagatggttccaggatcgaacttccgaattcaaaatcaacttttgatttctttggcgaaatgtccagctatcctgatccaaaccgacgttataccatgggactggcttcaataatttatgatgttctggatgattatatccttcatgcatctatccataaatttctttcctctgaacgagcagctgcattagaacatcttaaagttcttgaagatatgggactatataacaacagtattattatttttgacagaggttattattcagaagatatgttccgctactgtgtagagcatgggcatctctgtgttatgagactgaaagagggaatcaatttatctaaaaaatgcaatggtgatatgatttccattcttcagggaacttcaaaagaaggtacttccgatgtacctatacgtgtccttgagattccgcttgatgatggcacaaaagaatatcttgcaacaaacctgtttgatcctgctgttacaaaagatatgttccaggaactttacttctacagatggcctgtagaacttaagtacaaagaattaaaaagccgctttgccatggaagagttttccggtgctactgcagtgtctatacagcaggaattttatataaatatgcttttatcgaatctggcctcccttataaaaaatgaagcagatgaggaaatacagatttctgccaaaagcacaaataagttccgttatcaggccaatcgtgcatttatcattggacggatcaaaagtattgttcccaaaatactctgcggactgtttgagctttcaattattgaacagttatatacagatgctgtacgctgcagatcacagctcctgcccggcaggtcgtttccaaggaagaaattgaaatccaagggacgtccacatttccgaaataaaaaagcttctttttaaaatagagccagcattcatcaataggcttatttaagtgcggcaatttttatgaatcttctggtttccagcaaaacagcaactgttttctgtcataaaccgattaattttgtagtttgcattagaggatattcgctaatatgcccctaagttgacgctaggttgaccacattggtgtcagaccccaatgctacaaatgtgttgcctcaccttctttcaagcaaattctagttctttacgcttttattcaaaagatcatctaagcgaagtaacatttttaacaaattaccattttctatttctgctgcaacattaccatcaccgaaacgttcactcctttgaatcaaggtgagtcttgtattaatctgctctacagacatctcacttggtactatgtttctcggctgttgttccatatgttttccataatctctatccggcttcataaggttaaacacctgccaaatcccctctggatagattggaaagggaaaataattcaatccattttttgatggcggtgttttccattcaattttccgtattttacacaacagctctatacactgccacagcttttctttatcaatagataccaacaatgaatcacctgtataatcgaacatagcatgatatatttcctgtcccatagcaagcatcgtatcatctaatacagcaaaatagacttccatatccacaaaagaatcaagagaatctgcaactgcccttagtgccacttgccacgcttctttctttggataaccatatataccagaggaaattagaggaaatcctatagatttacatccattatcccgtgctaaaagcaatgccgtttgatagcattttcgaagcaaatgttctttattatgactgccaccatgccactgtggtccaacagcgtgaataatatatttggctttcaactgaaaccctggtgtgatcacagcatttcctgtatcgcaatgacctatcttcgtgcaagcatctgtcaattcattatatccggcttctttgaaaatagctccgcatactccaccgcctgcccacaatccttcattggcagcattaaccacacaatcgacatctaactttgttacactttttttaacaatatgtatgcgttccatagattttcctcccctatgtgtatgatacttttatacaactacatatttgattctttttactagatattttccaaagtctatattggattgcttatcaatgaacggctctttttttatttcagttgtacttcatagggtcagactcagacattcttgcatggctgttcgctgatactccgaaaggagcatttgcaaatggagtattatatacactggtggaaagcgccagagcgaatgaactggatgtctatgagtatctgaaatatctgctcactgaaacgccaaacaatcatcatctggaagatccatccgttatcgacagtcttctgccctggtcaaaagaactgccagagcagtgccttttaaaaaggaacagaaaaaagtgcctcaaacattgatgtaggtattatagcaggaactctggctttttttttctctctttccactctatttccgattttatacttcttttatagatcttttaactctgctttatccttttagttgtacttcgcaaagtcagacccagacattctctacaaccccaacaatcctgtgtgccatagcaaaagagatcggtggtttcgacaagataagcaatctttattacgacgggaactggagcgaacactggtatgcccgtgtgactattgggaaccagacaaaagattacacgttttgtccggatgtgagtactggagacattggagaaattcggaaaataaattttatggacacttccaaaatgacaaaaatttattaaccaaacaaatgagcagaaacagcattaaaactgtttctgccctgttgttataaatctatattatccatttttgtattaccactctggcggtagattttcatatattttccgcttgtatccagagtactccgattccacctggcggtatatgtctgctttacttttaatttgacgtatcctttgtacaattttaatgttccagtgccggaattgccccatgtatctttccacttaaaagaaactgtgtttcctttacgctttgctgtaatgggagcagtcgcatagataggcgaaccattgactcccagtttttcaagctgaagcctgactttggtactggtaaccttatttacaatgacggaatagctcggcttgatggtgaccgtcatattgcttgaaacagaccatgtttttgtgtaggtcccggtgtatttaccggaagctgcttgggctggctggtaaaacgtaacagtaatcatgatagtcagcattaagaatagtaatctggaaaacctttttctcttcatggtaatcaaatcctcctttatgtttataaacatattgtactactggatttatatggaaacaaggacgaaatacggatttggaagttttaaaaaccttgaccagggcgaatatgaaatcacagaaattaagactaagcctgcagaagtacaggcattttgctattatcaaaccagtcacagaaccctgccatgtacagcacagaggaatccagtctggtaaagatactcttttctttcagggaattccattcgtagaaaccgcctgccggaatcaacagccggtgatataagatcccgttttgaaaagaaggtttatccaaaacagtttctacccttgcattgatgaccagacccttgctttttgacaggggatatccccatctgcatatacccagttccagtccgtgttctgactgtccaatgactggtgcgacatcggtcggacgggtatctccttgtgccagccagatcctcccatctatgttctgtaccactctggaaatatcttccgtcataccgggatcaatgtaatatctgctgcacatagttctctcctatttaagaattcatgtactgacagtacgttagacttggatgattttccttagggtactatattttgatttatctctgcagtcagatcctacgtactgaaaaaaggagtccaaatgactcctttttctaatgcatatcaattatttttaaaatatcgtatatccgccatctacagccaaagctgctccatggatgaaactagcttcgtctgatgcaaggaatgcaatggcctgtgctacttcgataggttctccaggacgttttgccggactcattccaatcttcattgttaccggatgctgtggaattgcaagcacacgtgcaatcatatctgttgcaatcggtcctggaagaacagcatttatacgcactcctgtacgtccatgatccaatgacatctgacgggtgagtccaagaaggccatgtttagcagaagtgtaagcaagccctccgcggccagctgcggttgctgccatggaagctacattgacgatggttccagctccttgtttttccataatagggattagtttcttgcaaagaacaaatggtgctgtgagatttgttgcaagaacagtgttccattcatccattgtgatctgatccatattggcagttgttccgcctactcctgcattattaacgagaatgtctatttttccgtaggcgtccagagctgttttaaccaggttatcaagactttcatcagatgtcacgtctgttttacagaaaattgcttctcctccggctgccttgatttcattcacacagctttctcccagttcttcctttgttccaacaactatgacttttgctccttcttttgcaaagagttctgcggttgctcttccgattcctcttgttgaaccggtaatgattgctactttgttttcaaacttcatggcaatgccctccttatcttcttcctgtttccatgaatgctgttctgtcataccgtgcggtaagcagatacggtgccagaacatctgcgtcaatctcttcacataaattcagtttatgaaccatcagatcatttgaggaatacgcacctccaatgactgttctgattggaagttctccccatggatcatcaatggacgattgtaatttaatcgctgcaaaaccaggctcccatgaatggtaattgtattcacagagattctgaagcagagcaccattctggaaatgtgattttccttctttatccggttcgcggtcaaggtggaagtagaaaccaccgccatatgtctttttaccggcttctgggaactgatacagcattccggtcattgcgttattatattcaccaatcttgagatcaatatttacaagttcagtaccacgacggcagacttgagcggtcacatgatcattgtttcgacggattacaaattcagatcccagtttctttggaattgatccattgtcacgtccacactgaactgccatttctgcaccggttcccccaagtacaagtcctattggatataatccaagctgtgttccatatgtacagtaaacaccaaggattgcttcataataatcatcagcaaaggtaggctccttaacatggcacacagataccgtaactacaggcacggaaaatggttttaacggtgcaggcagaacctttgcaatcgccgcaggatcggtgaggtatgcaagatatattccctcctgatttttcataagagatatcttaccgaaattaggcatttcctccggagcagtgataaagcttggagttttgacagatgtcttaaacaatttccttgctgcttcaaaaccacttctggatgcaggagcaatcgtaccgtctttcacagcatttccgatagcctgagcatggattcctttttcttttaattcttcaacaagatggttgtccggacggaaaccaagggaaagaacaacagcatctgcagcaacttccacatttatcttatcgttcagtctttcaagtacaactccatcttttttgatctctttaagagcatatgccatcatgaactgggcattgtattctttcaatcttccacatacatctgcaacatttgtatgatttgcattaggagcaactttgtcaagcatatccgcaagtacaacggtatttccttcgtgacagagatattctgctgtttcaagtcccgtaacacctgctccgatgatcattacttttttattcttcagtccggcttttccggaaagaatatcttcgattgtatatacattttctccggttattccgggaatagatcctggaatgacagatttagaacctgttgctacaagtaccgcgtccggattcatttctgcaattttatccgcagtcgcttccatatcaagttttaattcaactccaagtttctcaaattcaacattataataatcagcaatccagcccatacgttctttgaaaggaggcttctttgcaaggtttatcgtacctccaagctcactctggcggtcaaccaatgttaccttcatgccgcgttcagcaagtgttttagcagcgatcataccacatggtccgccacccacaactactaccttatgttcctgagtgtcatattctgcatttccataaagacgttcgcggcatgcacgtggattaactgcacattccgcaggaatacctgcgcccatccatgcattcaggctctcaaagcaacgcagacagttgatacatttacaaatttcattctctcttccttcaagtaccttgagtccccactgttcgtctgcgagccagcttcttcccatggagacaaaatcaacaatacctccttccagaaaactctcagctacctgtggttcacgtatgcaggaaactcctatcactggaatagaaacgtgatcttttacggccttgatcaaatcttttctccaaccctgggggaaggagatcggctctacacatacacttcctgtctcgtataaaccaacagacacatcaataaaatcaatcccgcatttctcaagcgccattgcaatcttaactccatcctggatatggatataatcctctgtcactcctgttttatccagaaattcttcaacgcttaaacggacaccgatcggaaagtccggtccacactgtacacggattccatttatgatctcggtgatcatacgaagtctgttttcaaaggaaccaccatactcatcttcgcgtttatttgtgtaaggggaaagaaactgttgtaatagatacccatgagccgcatgaagctctactccatcgcaacccgctttttttacccgtacagcacctgagataaactgttggatcaaagcttttacttcttctgttgaaagagcccttgtttcttgctgaagatatttgcacggtattgctgaagcagatactaccggaccgcctgtaagagcagttactgtttcacgtccagggtgatgcagctggatgaatatctttgtcccatatttatgtactgtttctgcaagctttgcaagaccttcgatatgtctgtcttttgaaacagacagctgacgcatcatccctgcaccatgcagatcgtttacccttgcaatctccggaataataagcgctgcgccaccaattgcacgtgcctcatagaatgcaatcatgtcttccgatggagacccatccatctccgccaggcttgtacccatcggtgacattacaagccggtttttaagtgtaatatttccaatttttccctgtttaaatatttcctgatacatgtacaccctcctttacttgtgtctcttgattattatggcttaaaaataacattttcattgttaaaaaaacaacggcataaatataaaaaagacattgtgtatttatgcacaatgcactataattaataataatctgcaaaacactgtgcatttttcacaaataattgtaaagaggagtatgaagatgctgttttccgatcttattgattatttaaaaaatgaaaaaacttttaacataatactaaattgttctactgatcttcatgaaatacgagatgtagagctgctggatggcactcaaacaggatacgccacagatattgtctattttggttatccagatgtcttgtctcctgatatgcagccttctcaatgtatccttgttcgtggagaaaactatctttttccttattcctgcacggatcgtgcaacagtacaggcaaaagagctttttgcggtttttaatgcagcaaaacagtttcttcagacacatgaacaggttagtttatatgaagaactggttcgaaaaggccactcttcccatagcctggatgaagtgattaactctgcatccatcaaattaggatattctttggtattttgcgacaagaaattccgtatcctgtcatattctacatcaattccggttacggataaattatggaaaaagaatattgaacgtggatattgtacatacgatttcattaaaaatgtaatgtcattggaagctgtccagggggcttcagccagcattgaggctgttgaagtatcttgcccggaatcaccatatcgtaaatgtagttcgaaagtgtttttaaacggtgttcaggttggttttgttctgatgatagaaaacaatatcccttttaccgcagaacacttagcagctatgagtgatgtaagccgggcaatcagctccgtagttggacattatcatcctgaactgtttcagtacaccagtgcggaccagcagcttcttgaagccttgctgattggaactccggctgatatattggcagattccatttctcatcttcgagtatctgatgcaatgtatgcactttgtatccaaccgaagacatttttgaaggaaaataaattaaagcagcagctttatcctgtgatccgacatatctttccggaagcatatatgactgtccacgacaatgcactagtcctgcttgtaccagatcagagttctgttatatttgtagatactcaaaaaataatgcttaaaacgatggcagagtatcatctggatgtaggaatctccctggttttttcaaaaatggatgaattttacagagcttatcagcaggcgcggacagttcttgaatggaatcacagaatccctgataaccttaagaaggaaatatcatgggatcaaaggtatccgatggagcatcaaattcatcggtattctgaaattgagttctacgaaatgatgaacaagatcaaagaaccagaaaaacttgcagattatatccaccctgccctttacagactgaataaatatgaccagagaacgggaaatgaactttaccatacacttgaggtatatctacagtgtttccataacaataaggaaacagctaacattttgtgtattcacaggaattcgctggcttatcgaatggaaaaaatcattgaaataggtaaagccgatttaaacgatcccatgacagagtttctgttgagaatgtcttttaagcttgtggaatatttgaagataagagacctcgatctcccctgatatttaaaattgtagcttttcataacattataacgaaatgctgtaattctctctgaattgtcagtgatgccatagtaatggagataaccagtcagtatctcattaagcttctctctgttgactgtgagtttcagcttctcttcaagatatttcgtactgctttccagaagtctctccgatgcccgtttgctcttcgcaattgaagcaggggacttacttgatttggttaaaaaggcatatgtcaaaaatgttattgacatatgccctttatagaactattatattataacaagaaaggagcagtttatgccaagaccaataaaatgcagaaaagtctgccattttcccaatgttttagaatttcttccggcagatgatacggagaaaaaagcccccattattctgacggtagatgagtatgaaacaattcgtcttttggacaagaaaggttacagtcaggagcagtgtgcagtatctatgcagatcgcaagaacaacagttcaacgaatttacgagattgccaggaagaaaatagcagatgcacttattgatggacatccgcttagaattgagggcggggatttcagaatctgcgatggtcaaaatagcgactgcaaccttggaggatgttacaagcaggagctttatcaaaaatatgcagtggaaaaaggagaaggtattatgagaatagcagtaacatatgaaaacggacagattttccagcactttggacacacagaaacatttaagatttatgatgtagaagaagggaaagtggtacattcagaggtagtagataccaacggaagcggacatggcgcattggcaggagttcttaatgcattgaatgcagatgttttgatctgtggcggaatcggagggggcgcacagacagctttagcggcagccggtattaagcttttcggaggagtttccggagatgcagatgaagcggtagaagcctttatcaatgaaacacttgcgtataatccaaatgtgaagtgttctcatcacgagcacaaccacggggaaggacatacatgtggcgagcatggatgcgtaagccatagctgtcattaagaagaatggttcgcctaagagcggctactgggagattgtagataaatatctatactttatagggccgtacttcatagggtcgaaccatgacattctttactaacagtaaaaaatatgccaaaaagattaagaaggcagagaaatgtgtggtatatgaaaatacagtcagagaactgtttagctgtgagcagttcaaaaaaggtgcagaagcaaaaggacatcaggtgaacatggtacagagcctgcgacggctgtatgagaaatggcggtacctgtgtattaaaagatgacatggctgaaatactcggaatgtttcggaaagcagatgtacttgtactggctactccggtttatttttatggaatcagtgcccagatgaagacctttattgaccgcacttatcctatctggcagcatcttggtaaaaaagaagtttactatattatatcggctggtctgggcgaggacatcattgaaagaccgcttggtgatctggatggttttgtagaacatctggaagaatacaagattgcaggaaagatatatgcagcaaacgtgatggatgccggattagtcagaaatcaaagtgttttcaaaaaagcctatgatatgggatattccgttcaaaatgctgagaaattgagagttggcgaataaagcttataaaaaacaaagggataattatagatgtcataaaagcaaaaaaattcaagtagttatttttgccccggaatccgttagctggcagtagataagcaaattagtttcttatcactgttaagccaaggattccggggattttttgttttctacgttcccttgttatttatgctgctgacacaccattttcacctgtgcgtgtcctgttttctacgccggaacggcggattcctgcaaagatggagcctgcaatattatgccatacactgaaaatagcacctggaagagttgccagtggattggctacaaagttagctgctgccagagaaactgccagtccgctgttttgcatgcccacttcaatagctatagctgttgcccgtgtatattctacatggaaaatttttgctgcaaggagcccaagcatcataccacagaaattgtggatcgcaacaacgccaaggaccagaactccgcagcttaagattttctctgcattaattgccacgattccgccaatgatcataacaatggctacaacagagatcaatggcataacatctgaaactttatctacatgatctcctgcaagtgtacggagaaggattccaagaagtacaggaaccagaattacttttacaacagaaagtaccattgcccagaaggatacttccacccaggcacctgccagaatgtacacaagaaatggagtcataacaggagcagccagagtggaaacgatggtcattcctactgaaagtgcaacatcaccgcctgcaatataggtgatcacattgctggctgttccaccaggacagcatcccacaagaatcacacccagagccagatctgcgggaagattcataactttacacaatacccaggctacgactggcatgatcgtatactgtgcaactgcgccaatgatcacttcctttggtctggaaaaaattgcccggaagtcttccagacgtatggtcagtcccataccaaacatgatcacgcccagaaaaacagatgtataatttgtcatccatgcaaatccatccctccagaaaaaggcaaggcatgaaaaggcaatgatgatgattccaatatatctggatgcaaaactgctgatttttcctattttctttaaaatattttccatatattatacctcgtagctgaagttatcgatcagtcttgttttgccaatatagacagccattgctacgagaacattatgatcagctttttccacaggctgcatggtaagtgcatctaccatggaaacgtaatcgatttttgccagaggctctgcctcgatcactgcacgcattttgccgagaagttcttctgcggaaatgcctgcgtgaatgatttcctgtccgagttttacggatctggacagacagagagcagcctttctctcttcatcgcttaaatatgtatttctggaggattttgccagtccgtcctcttcacggacaatcgggcagcctacgatttctatatcaaaattcagatcctggaccattttgcggatgatggccagctgctgagcatccttctgtccgaaatatgctctgtccggggctacaatatggaacagcttggttacaactgtgcacacacctttgaaatggataggacgtgtttttccacaaagtgtctcagataatgtatcgatacttacaaatgcatggggatcatgatacatttcagaaggttcagggcagaagatcaggtctgtgccaagactttcacagagtttgctgtcgcgttcgaaatctcttggatatgcctcaagatcctctgtcggaccaaactgtgttggattgacaaagtcagacacaactacaatgtcgttctgttctctgcattttttgatcagacttgcatgtccctcatgaagaaatcccattgttggaacaagacctatagttttaccttcttttttccatgctttgatctgttttcttgtttcttctactgtttttgttacctgcattgttatctcctctttctcggtcaatggaccggtatcatagattttgagatagcctcttttctgaattcactttcatcttatgatagcctctaatctgatatcaacgttttcaggccatgtctttcagcagaccatgtttctcataattggtcactctgctgatcttattctcttcatctacaaatacaactgcaggcttatgagtgcgtgcctcttcaggctcatatcctgcgtaagccatgatgataatcttgtcacctgtgcttacacatcttgctgctgctccgttcagacagatcataccgcttccgcgttttccgcagattgtgtatgtctcgaatcgactgccattgttcacatctacaatctgaactttctcatattccagtattccggcagcttccagcagttcttcatccacagtaatgcttcccacataatccagttcagcctggataacagttgctctgtggatttttccttttaacatttctattgtcatcttatatagtcctttcctgcgggaaaaatcagagtcaagcagcaccataaaaaggaaatatacctttatgatctgcaaaaaaagcgcatcaggatacactttgaccctgaaacgcttctgattgattccctgtatattgagtcctgtttctgatacataaaatatgttttactattccatagattattggaaatctgattttttgtatcataaataccggctcgtatcttttaaaattacatacatccctccgttcccgtttccggattccggctggctgcttttatataagattccagtgatttcagccagagtatagttttgagtccaaatactatctctgagtggtattattacatctggtcagttatttgtcaataaattgtttatttactggttactgttcactccgcgtccagtaatacactgcgaaatacaataaatatgatactccttgtgcaaagcccaaggagtatcgtttgcttcgcagacttaatttatgctaatcacataaggaaccaaaaaatcactcatctgacaaacaatcagacggatagcctcatccaaccgtaccttcccgggagttatttccaattcgttcatatgtgcaaagaaatttttccgaaagacttcatacggcatcaataactctgccgcaaacaggtttgtaatctgaatgtcagaaactaaacagctattaccataaaaataaaaagtttctctttatgatacagctctccgaacactgaaagaaaaatctgtcggaaataagctgccttccacgaaatccctctatgctgaaaaagaccgacttattgaattgcgaaatatgcaacgggaagatttttctaaccgccggaattatgaacgggagtttcgtaccgtgtctgccaatattgatatgatccttgggaagagctacgaacaggaacagcagattgagaaagaacagaatttataaatttcctgttttcatgctttctaaaaagaggtattatataaaaaaacgcaggaggtatattcaaatgaaagcacataaatattggtcacttggtgcattggcagccatgattggaaccttttataccggctataaaaacatgaaaactgctcacaaatattttgcttgcagctctcttctctgcatgattatggctatctactccggtcataaaatgatttctggtaaatccagaaaaaagaaaaattctgtttctaaagaatctgcagaataatcaaaactaaagaaatgtttacataggattgcctgatggaataaatattttccatcaggcaatcttgctattttacatcttttttcaatctgtcgtataatatatgtaatcctgtaatcccatcaaatgaaaacagtccttcttatcaaacgttattataagtttaaccgcaacattttttcttcccagaacaatttcatactctgttgattgttgataagagaggaataaatgatgatacacaatcaacaactgttctcatctatattttccgcaactccctttattttcataataaaattaagaaaggccctgcacttggcagagcctcccagcattttcttttgagagcttttgctccctagccagattgtggtaaatgctaaacccttataaagctggtaaggcactgcctcctggcacaacaccttacttcaacgcttgacagacactcctgttgcctgttgttaatattatattaacttgccaccatgaatatgtcaattacttttctactataatttacactataattttatagctgtttgtatgaatatagattctctaacaatttccatatttcattctccattttcatactattattctgctcttatttatgtctttttctgcaatatgttcttcgaaagctactataccctcaatttcaaaattgaattccaactgtgaactcggaacataataaaaatgttccataataaatttcacaaatttcatcggtgatattggacgatctacaggaattctacaatttttatatccccctaaagtaatatgtgaatatggatgatgcagttcgctctcctccggatctcgattgtaatcagctcgaataatcacaggcaatacagatttatttaaaatatctccgtaaatatagtcaacatcgtataattccggatcattctgataaagttcatacgacggtgatggataataccccaatctgtgcgaaatcaattcttttcccgttctattaaagcgatacatcaactgtatgataccgccatctggcaatttaacattataattatgatttttttctatttcatcataaattgtactgtaatccatattccttaaatataacgaaatattttgatatttttcccatacaatatccatttgttgaattacaggatagttatattcttctgccagtccacatctgatcaattcccttgtaactttctttaactctcgaaatactttttcttgttctttcaattatacagcacatcctttaagcgattcacagtatcttcatctaaatcttcttttcgaatttctccatttgcaagtttactggtaatatccgccagattagaattgctttttctgatatctcttaattcattttgagtcatgtctctatgaataattctcatattctttcgttgtgatttgtccgggtacgtgaactctaattgaaaattcctttccttaacgctgttaaactcctgtattaacagatccatatcatctccgattccgctaacccgtacccatgccttcgatcttgtcatagcagtaaatataatatttcgttttcttgataagttgatgcctcttgcgcaaagatccgcatttatcagataaacaattgctgcttcatttccttttgctctgtaaatctgagagattgcaatagaatcctcctgaaaaaaatcatctggtgttgtctgtaccccaacaatatgcgatttaattcccttttccattaatttaacacggatatgtgacacgtaactcttcgtaattttgggatcagggtgaatgatcataatgtcctgatatcttaattcttcatcatgcagatttttttcgatatcttcaactatccaatccgcttcctgtacattattttcaaatcttctaaattgtataagatcgtcaattgacgaatgatcctctaaaaatgcaggacttgtttcttctgttctatatagcgttacaaattctccatctctgatcacaccttctttcactgtatatccaatatcttcccataactgtttatcttcaaataattgaactaacgatgtttcctcccgtgcctctttttttctgtaaattccaaatcccaggctgtgtgctgtaataagaactggtcttgaattacgataacattttgataagacaatatcctccgccttaccattactgttatcaagcactacattcggccgtccattactgtatccaaaaatgtcttccggagattcaacgtttttgttatccaggctttggagttcatcatatgcatatacaagcatacggctttcatgtgggagtgacatataacacatctgaagaaaatattttgaaaaatcctgtgcttcgtctactaaaatcacatcatacaatggctggggattcgttactgattctacggcttcttcacatactctatcaaaagcagatgaatttcttccatatttctggcacgcatccatataatcataacaaactagattatttgccttacaaaaattgaaatacagaccttctgaatttttacttccccatgcatgaattattttaattctgctccaatcaggttcctcatttgtattttcaacaataaagtttgtgatcagttgaataaattgaccctttaatgcccggctgttaaatgtaactgctatcatcttattttcatacatagtatacagatatgctacctttaatgccagaacaattgtttttcccgatcctgccagaccccggattcgttgaacaccttctaccgtttcaatgactgccttactttgatacttgtccaggcaggaaatctggtcttcaattgcttttaattttgatccccttgacgaagccttctgaagattttttctgccacctctttttttcagttgtgaaatcatctgaatcgcttccaataatttcttataatattcttcgccctgtttccattccagactttctaaatattcctttacttcttctattgatgtacaaatttcatcactcttcgttttataaaggggtgcataagacagtacattaatcggcacttgtaaaactcgtctttttgacagatatccatatcttttcagcttggcttccatattattatatagttcatccaataactgaattttatcttccatattttcttctgctaatgtttccagatcaaaaagtacaatacccgtctgttcgctcactaacaatgcatcaactttaatttttccatcaattccccctaaaacagggtagcccaaataaaaatatccgtctaatcccattgtttccaaaagatttataatttcatttgcaagcacctgtttagatgtaactccatttacaattgtaagcatcttatcaccctttacttttaatatgtcatgtttttctgtatatcatttctatcatattgtcacacagggaaattaaataaccgaacggttaacgatttttctcagatatatgtctcatatatagcagatatactaccgattgtcaatcattgacaagacatttcttcatctctttctccatcgtgcatactaataagatctgtcttatccacatatattctggaattcagagcaaactgaaatgcactattgtctggattcacaaatcttcccctgctttattcttttttatttttccctcatggaatcagattccaatgtgcacgtatttatcttttgaaacactattgttttatttttcccacccgttctctttaccaattcatcctgccctataatttttatcagattgataatcttctttttataatcctctttatcggtgtaaaaaattattatcttaacattttcgtttaaaataaattttcttaatatatccttatccgtaatgtctaatgaatgtccaaatataaaaactttatggtacttaactactctgtgatgctttttaactattccattctctttaacgattgctgatatttcatatatttttttctcagactgaatttcctcaagccagccttcatataagccccctgtttccttatgtattctttgaaaaaatttcttaaattctataaattcgaggtctttatctctcgcatctccttccagatattcatcaattccaagcaccatatttgtagattggatatcattccttaaatcagcttttccatgcacataatcaaactccaaaaacggatgttctccgtatatcctctgatatgtacatgtatagttgaacgataaaattttgtccaaatatggcaagttttttatatctggcagtccatttcccagcataaaattgctaatataatctgagagataaatttcaagtgcacgtgtaagtttattcagatcttccagaagtttctgtttccaaaagtcaatttcttcttttttccagacatgggtcgccattcctgatgaactatccatcttttccaaaaatagtgcaagaacgtttaattgcctttgtgaaagcaccgttcctacgcctcccttttgtatggtctcttgtatatccctgcttacactgttgaatgtctgtataatcagggaaatttcactttcaaagtcaatccacccgtcttttcctttttgctctctgcttttatacacctctgaaaaatatttaatccatgcattatccttgcacaaatcacttaactcatgaattgtttttcttgattgatcatataaatactgatcaaattcagaatcttgtttactgttaaataagtctgtaaaatacttatagcaattgatatcctctcccgcaatcaattctaatcctgaactttcttgtgccttatgcttgtaaaaaaaatctataaacttcagaaaatccgcatatttcgtgggcaaaccatgtgccaaatcaaatccatttcctactattaaaatattcatcctttgtcctttactggttatgaatttccacttaaatctacaacatcgcctctagtctatgttccagttctattttttgtttaacatgatccttccagtaatcctcatgccgccgtataaataactgtatcttcctgatactttgagtcacgctttcatccgcctctataatctgcttttcctgccctgccagtacaatataaaatatctgcgttatatcatagaaaaaagcgcaacacatatgtgtcgttttctcataccatgcatacatatctttttctaatattttttcgtaatttaaaaaactaagtttccactcctccttatttttcaaatcatattgaagagaattcaaaattaaactaaagtaaccagaaaaccatatttctcttaaattctcatgttttttcttctttttctcgaacaataaattccaattctccaaaatatctttacttatattttctaagatatatttttttgatgtatccgataacctttcaaattcccaagccacaatatcctctttatgattctgcagcatcatatccagattgattgtctgtgcaaaacgcttcagcgcttctctgctgactttagaaagaacgctaaaaagaagctgctgccaatttgtattatgttcctttctttgtacccagcgctcccacaacgccaaatccctgtcagcaattctcttgaccgctgcaattattgcctctttgcatttttcatctatacccgatgtccgtttcaacaaaatcctggcacattcataatagaaacaaggatatgctacatccatctttgcaaaatccacaagcatatctgtttcacagcaagttgaaagaaatatccaataatctacaatgttatttttctctgccaaaagctggcataaacgtgcagagtcctccctatatgctttttgaaacaatctgcagactaattcatcaggttttatactttttcccctctcatacgcatcaatgaattcatatatcttatccaaatcattatcagcaataccttcctgcaaatgttcaaaaaatttctgatcagcccttcctgcgttaccagcaatatgagtactataactcaccgaactgatcatttcccaaatatctttttttattgtcttctccatcatactcctttcttccataccaggcattccggagcatccaactcattccataattcttcaaatgcgtctatcatcatctgtggatgttccacactttgaataatatgatgtttatttccaaggctattcacagatgtacccagtgaccagacagaagaggtatcctgatctaaattaagcaccatgagaaaacgatcatgaaaactgtaaccataatcagcccactggcatctaagctctacatgtataccataatgattactccttttctccataatttcctgctgctgttctatccaatcacatacactcattttacttttttcggcaatttcaccagatgtaattgcatataacgttacattcatacttttcgtaaaataccaagtatgtaaaatatcctcaactgtcagataaggctcccacagatacaccttccctgtttgtgcacgattcatcaatgcaatcacatctttcaaagctttctgcggttctgaatctcttccataccgtctaaactcagctctggcatataactcatcaactcgtctgctatactgacgcttatgtatatgactatctcgcgtccgaataacaggttgttctataatattaacattctccgctgatatgggttcaataatgtcaacaacctgtcctgtttcatcataaatgatacgctgttctccatactgtgcacccatctgcagcacatacgtcattcttcttataaagcttgtttcctgacgcgacaaaatcaattgccgttttacatcaattatcgttgtcctgcaaaatcgggaagcatcaccaacttcaaatgtagtattacatccttcctgtttaaatgtcctggtaccaaatgaaataatcgaatcatcaaaaacgccttctgacaataccagaaattgatcatctgactcacattctttatcaaatgacacatcatacgttaactgtctctccatatcatcttttttataagaaacccttacattcgttgacggaaattgaaacacaaaattcccaatacgatctgatacagaaaacaaatcaattggaattgcatcgaatattgtatctgtcatctttctgaactgcactgtgttcaacacatttacaatctttttatcacagtcaaaaaattccaaaatataacttccattaataaaattattttttaatactttgtttaaaagcatctcttttgtactgtcctgctgaataaaaactttcgataccccttccagatatcctgtttctaaccttccatctccgatgtctacttccttcttatctctactgttgcataacaattcaaaaatacttcgaacttctgatacatccagcacctttctctgtattcctaatgaatatgtatcagtaatacttttaagcttttttaaaagtctctccgagctcttttctacgttcggtcttgtttcaaatacaaaaattgtatatacattatccggcatttccttttctctttggcatagatatatcgaaaccatttcacaacaattataactaccaaggctcttacaggaaatcaattcatcaaattcatgcaacaaatattctgtcggtagtttttcgttcactctttctctatacatatttttctccgattaaatagtacattttctgtattatgtatgcgatattgtttaattacctaaatcttattatattataatttccacctgtcggactgcatgctctttgctggacgcacggtctgacctcaatgtccttgacaaaagcacaatatgctgagactatctttagaatggcaaaaactaaaacctggacttcataggatgcagactccaattccgattgaaacgagcaccctttcgagcatcaccagtcgtcgaaaatttaagtccccggagttttcaaaataaccacccatttctataatttatattctttatatagttgttcacgatacacctcgtcctcagatgctttctcagcatctgaataacgtttattctttaatagaatatttataagtgctcctaatcgattttcaccctttttttcaccttttttttcgcccttttttattccattttcctctgcataagaaatcatacttaacatatcagacacctccttctgacgaacttgattatccgaatctggaatatatgataatacttttttctggtttccggaaaataatccatataagagatccaaaagtcccttttcttcctgtccttctccaccgagccgtactattataatctccaaaagatctgattcccaggaatcaattcggaactctttgtctttgattccctcatttttgtaattctgcatcttataatatgatatggtattttccagtttcctgggaatattatcgaggcagatccagatactgtacactttttctaaatgaccatatccttttccattttcccctatcttatctaattgtgcagacaatttacggcagccataatatatacttctttttacaaccggataacccggtgtgtaattttgctgtatctaaaaatcaatatgaagatttaccagaagctttccttctgcttttggatttaaagaacggaacagaatatcaaatgctgctggtgcttcatctgtcgtatgaaattctgtatcctctccacgtatggtttttgccatatcctcttctaccaacgcggttcctatctgaatcgtatcaccttctatacaattcataatttcttccagggagcagtctctatattcttctacagtatattttagaatattactcataattggtttatatgaaaaaatattctttgctgactgatctttcgtttcttttccatctatcgtctttagtgttacagaaatactgtctttcacatccataagtctctcccttgaccagcttttatttgtaatttaagtatatatcttttgagggaacatagcaactacagaattctacttattcattccacgtatcccttcttaactcaaaacatctatacgatagccccatattcttctgacagctcctcattgtctttaaatgagctaaaaacaagtcaagcatcagcatatccggagattcttctcttggatatatctgatgctctctttttcttttcggaatttcgggcttactttcgtttctacggtagcttctcggaacccttgattttactgctttcctagagctatttttacaagtaattaactgaattttctgtaaattaccatttttaccctttttttgtgctcgtctaaaaatccttcagctcattgtgaacttccagtttttttccgcctaaatcaagtgtcgctatatctgcgactcaaaacaattctatttttccgtcttttctccatctgatcctgcatttaaaaagttcatgatctcctcatatgaccgcccactttttacaactgctgacaggatctcttcttttcttatggcatcccgcttgtctaacagttctttcagatttgctgttgcctgatcatactttttcttcgctgcgatcacatcagcctctgctttttcaatcttttcttccaatgcttccttacttgtttttcttgttcttgccatctttattttccttccttattctgcttctttcagttccttactcagttctgacgcaaagtattttatactattcgcatccagtccaaaggctttcaatattactttctggttcgctgttactgcatgatccagacggtatatattgtctaactgacgtaccatttctattttttccagctcttttattgccgccggtacagtcatatagttcagtttcttatccagttttttcatttcttcttttagttttatatacatcttgcagcgcactatcatggctacaaattcaacaaatatcttcgctcttgctgattcttctgaatacacccggatgctcttattccccagatatgatttgtctccgcggaatagtttctccgatacatccctgctcttatacagttcgattgcttccttcgcactcatcttttccgatgtaacgatacaaaaatatcctgccagatccagttctctttctaccacactgcaccgttcttctggtagtataaaagcctggctcttttcatcataataaaggttaaaatacttctcaaatccaggaccgaattcctttactttattctggtactttttcagatactgcgtcatctggttgatccgattttcaatctctatccgttctgcgctttctttggaaatactatgatacagatgaaaataacgctcttttttatcacttgcatacagtttgtgccgtattgtctttccgtaaactccatattcatagatattgtttacccgcttattttcgaatgtccctttattttccaggatcagttcattcacaagggcagacatccctttcaccatgataacaaaactatacccacatttatccatatattgtatattctcgcagctgaaatatcccctgtccagaatgaatccgatcttcttataaccatatccggatgctttatccagcatgaactgaagctgggagatatcattcagacttcctggatatttttcataaaataatggttcctgattatgagtatcatacgcaactgcataattaaataccggctctcccatatctactttcggatgcccaaattcaaccatttttatatccccggcctgacagtttttattcgttgaatcataagaaatataaatcttttcatggtaattccgtgactcattccatgtattcagaaatcctgtactctgatcatctgttactgaattcaggaaatctaatacggttgaatcactgtattgtttcatcttttccgtaaaaagtggatggttgtatgtataatccggatagtactgcgctgcattgttttccgctatgatcgaataaacagccagatctaaaaacagccccatatcacgcgatccaaaatactttccaaggatatcgttcaagctgcattcttctatgatcttacgcagtacaaaatatgttcctaccctgagacagctacttctggaagtcctgtttttgctttccggaagctctgcatcggggaaatatttcaggaaattttgattcggtttcatgagttccggatccgtatctgacagttttccgatcgttactcttttgagaaaagtatacttccgggatggatcataaacccggtcatactcatactctatatatacaacatttgacttttttctccgtgtgattttgccttttacagttggtactttcactaaaaaatccagatacatagcgccctccttttaggcggttatccacctaaaataggtgtactatatttcccggctgtctgcaatggaaaagcgcagaaaaccgggattttttatgattttatttttgttcttttttctttaggcggaaaaattactggaagttcacattcaatgctgtgattattgatggggctttctccctttactggacgcacgtctgatctcaatgtgctgactttaaataatattgtcacagtgatatttcgctctcacactggctgtaaagccaaccgggatcgtagacttgataaccattacctcatccagattatactgaatccttgtcatataatttctttaacgcatcctttctcatcataataattcagattggttcctggaaaagcctctatgagtgctagtcgtatttccggttcgtcgcaaaacacttccatccatatcgaaaaaaatccatctcccaatgccgtcataataatctgatttttcatatcattctgatattcttttgacaggtctttcatatgattccagtgttccagcgagtttaatgctttttgataagctgtatttctttgtccaaatcgtctatctctatcttttcccataggaagattgcctaaacctacaaggttatatgtattacgtgctcttttcaggtaatcccctgttgaatccagttttatcaataactcttcattcacctttgggataccattaatgtacgaatatgcgatagcagtattatcttcatctggccacaaatagttttttttattttccggcattgtctgtgccttttttcgtgtattacaatatttacatcccaggttaagattattccagtctgttaaatctccacctttggattttgaaaccacatgttctacctcaggaacatgtggtatagaaaattcacaataagaacaatacattcctatccgtctctctaaatatggcaatgcgtccttatattcatttatttttttatatggagactcccccttatttattggtctcattctttttcactttccatttctgttccagatactgctgatgtacccacgccatataagcaggattttcactgtattcagcctcaagttccgccagtctttttcccagtctttctatgtcttcctgcgattttgcctgtgtaagtgcttcaaaatacagctttgaagcttcatatatttttctctttttttcactatattgcggtagcacaacccccataatatcctccgaaatatcttcaatactctctcctgaatattcagattccagaggctggtctaatgtgatcagctcgccctcttcaagcgattgaataataaaaggcgaatgtgttgcacagataaactgaattttagggaacaattgttttaaaatcccaataattcttttctgccaggttggatgcaaacttaaatcaatttcatcaataagaacaatacccggtgtttcctgtaaggctttctccttcaaatatggatttaatatacacattcttgctgcaatatccaagattatcttgataacgtttctataaccgtcactcaacatctgaaatggaagaatggttccttcagatgtcctaagtgcaataatatcatcctcatattttgttgaaaatataattttttcacctgattttaactcatctctaaacgcttcattaaccgcccacaaaatgacctcataagccggaaaaatttttccatcattttcttcaactgcaacagctttaagcgtatctatatatcgaaatgcaatatccaatccatgctgcgcatcaaggcagtgactatatgcgtctgttctgctcaatacacctgtctttactgttcttttatttccatctttccaaagtcgtgctgaactaaggtataataccagtggcagaataacatcttcatcagagtgatctgcatttgcgattttgctttcccattcaattacagtctgctgcattggattttttccaccaaacttagttctgccatcctgtttcaaaagaacacgttgaaaaccgatagactcatgattaatattccatgcagccttacaactaaccttacaaggatactgtgggattgcgccaacagtaagaattctgctatcatctgaaatctgagtctttcgtcttgcatcagttgatttgatattaaacacaaacctggaaggtacatatgtcttaaacgctgcaagatatgcccccagcacgacattagccgcttccagtactgttgttttaccagagccattctttcctgcaaaaacattcattcttgaatttaacacaaatttcttatcttcaaactgcctgtaattaaaaagttctatttcctggatattaaattcacacatacaatatgccgccttcctgaacactagtgaatctggaaatttcaataaatccactaataaaaatccgctatatattgtctttagtataacggattactatgaaaaatacaatttaaagttttattatagaaattttaaaagcagaactgagagaccagtagcaaacatttaggttacttacaattgtttatttcattgggtcagaccccaatgtggtgctaaaaacggacggccgttatgctccgcagagcggccgttctaaaacgcatttgcgaccgccggagggcgcaaaatgcagctcaccttgaaaaggcatcaagattaaattaattatccgcataaattacagatattgttggactatcctataaatattatccaatttatcatcatttctgaactcattaatactattaatatcaaacaaattatgaaaatcatccatttcaccaatatatattggaatgttataattaaagtacttggaatccagtctaaactgggattgacttcccgtaatatcaataattgtacatcccctcagaatagaatcaagatcacagtaaggatatatatttatttctttattatagccatatccttctaaaatcctattcattttatttacttcttcataatctgtggcttcttcagctctttgtatatttttctgcaaaatagaatcatctagcacaagccaagcatgagttgtatttgaatcacttccactaacaacctttgtataaatgccttgctcccctaaaaaccttgccaaaatatctgaagcttgtccgcaacaggcctccgggaattgattaaatggccatttacaaaatctattttttttatgcgcttgttctattgcatctcgatatgattttaccaagtaatataattcactttcaatcattataatccacctttcttatcatcaaccaattaaatattcattccaccccataaacgtataaatacaacattttattgttaaaataacatctcaccagatatgatacatagcgaaactattattccatataaatatttttttaatcccaattatatattgtgcatgatatggtaaattgcccccggataccagtcccttaattttcttgcgatctttctccctccattttgcttcgctatttttaataatagtatcatctatgattatcccaaataaaaatctgtcagtcatcacagatttttatttcaatatgttttccaagtgcattcgcatatttctccagtacaaccagcgttggtaccctgccaccgctctcaaatcgggccatattcgacggttttatccctgtaatatccgctatttcctgctgcgtcattttctggcggtgtctctcctccactaactgccggattgtttccgaagatctgctcaacaccttttcctggatcttctctgtatatacttccagcctcttttccttggcttccttttctgtcaggtattctttcatgttctcctgcatttgtttatctccattccatctctgataactcatttacgagattttatcactcatgataagtttttgcaagatatttcatgtttcttttacagaacttttagctctgattcatttcttttatttggatttcatggggtctgaccccaatgtggtcttttagagcaacgttagtagcctatgctctcgttttcctttataacttctgaaactgcatgtcacacagtcagatgaaacaccgacacaggtcataaaggacagcagccatccaaacagcaaatgttacatgtgggtgcatcgttccggcgagttttatcaggagcgccctgtcgtgatatacgaataccagaaagaccgggatcatcaaaagccactggaattctacagggattataaagggatccttgtcacggatgggttacagcagtatcatctggtagataaaaaactgccggatgtgaccaatgcaaactgctgggcacatgccagacgtgattttgcggatgcggtaaaggcgatggataaaaaggatccctctgctgtgcacagttcggtcgcatatacagcactgcagaaaatcgggggattctatactgcagataccgagctgaaaaagctctcatctgaagaacgtcttcaaaaacggcaggagatcatccagccgatggttgaggatttctttgcgtgggtgaaagaacagctttctcagtgtacggtcccgccaaaatcaaaaacaggccagggactgcagtatctggtcaatcaggaactttacctgaaagtgtttttgacagacggagatgtaccaatcgataactcagcttctgaacgttccatccgtactttctgtatcggaaagaaaaactggatgttccataacacggcaaatggagcctctgcaagtgctatggtgtacagtatttctgaaaccgctaaactgaatagcctgcgtccatactattattttcggcatatcctcacagaactgccgaaacgctgcgatgtgaatggaaagataaatccggcagaactggatgatctgatgccctggtcggaagaacttccggatgaatgcagaaaaccgcgccgctgatgaggtggcgttatattatagatgggcggatgatttgacgtttaccttctaaccccaaagaacttttgctataaacatagcccccaagtaaagccccttttacgaaagccagcatcgctcccgccaatgccctttcagacatgactaatggaatgatatatagttatccgttatccaaattgaagtaatttatatcaaattatccattataaataaaatgttgctgatcgaataatccggtgtccgtgtccctgatttctcagtttgtcactaatcagatttgctcccatccggatgttccagattaaagatctcattacaggtcatgatcgtgtaaaaatgtaaatttatagtagacatgctttacgaaaaatcttataatatctccataggcagattccaacatttcagtttcaggctagattgggatggttaggcggttgagtcatgtcagaacagcgatgttctgtttatataaatatcctcatgacttcatgacggaaatacccaagaaggaggatatacacatgacagtatcttttgttatttttactatagtttacggaactgttagtagtattcttggtacttacatagttcgtattcttgataagaaatgcaaaaacgaccgccatagctcagatagcgatcgttaatgcgttgaatatttaatttatttagccttaaccttccaaagtttggctcaaccgtctaacggaatctgtctttttatataccaagctaacaacagacatttctatcgcctacttaaatgaatataattcaaataccaaattaaaaaactggttataaggttataaataataatctttttaaaaattattcttcaaaataatcgataaataaagcaattgttttttatgaaaaatatggttatatggttctgtatataattactataccacattttttttattattcaagtcaaagttatatttttccttatacaacaattatcttaggttagcgtaagtatattcaatgtaagtcacataagttcatatattgtcttccacccaccggactatataccctttgctggacgcacgatcagcccccaatgtgcgcatgtttttcagatgctattacactttttcaattatgcactgatgctttttacttttcttgtcataattaattctcacaagcaaaatatcaccggtataatctgaaatcgaggatgggtattttctgtctttaatctgctgtattgccgtctgtactttctggttccacttcagttcaacaaccaatgcaggataagcacttttatattcaggcttagggataaaaataaaatctgcaaatccgcgtcctgtaggaaattcacgaaccggtttaaaataatactgcatggttcccagataggcaatggctaatacgctgcttaatgaattttcatcatgatacctgatgacagaagcgtattcattatgaattttctcaatttgtgcagcaactgtttcgttatccatatccagcgttgcatcaagtaaagtctctgattcctgttggaacataagcatttcattccatgacttactttttacagcattagtcagttcctgacggatttcttcattgggaacaaaagcaattttttctgtctgatcatatccaagatatcccaaatggatcatataagtcagtacatcatccttactttgaatattaacagtgtcatttttgaatgttgctgtattaactttgacagatgagccggaaagcatttcaatgattgctgttttcaagccatcataattcatgttgataaaaggcacaatcgcttcataagaggctgtttccgaccagtaactcttatattcccctttcaacattacgctgataacagctctgggattataaacctggtaatctttcagcagatatccatcataccatttctttaccttatcaaaatcctgatggtacttatctgacaacttttgtacttcagcttccgtaaatccgatatactgcgccagaatacttggacttaccatggtaaattcatcaaaattgtttaaggcagactgagttttttcctttttaattggcaaaatacctgtaagatatgcaagctgaatatactttgtaggctctgtccctttgaaaataccacgtaagaagcggatatactcattctggatatcctcttttgcagcttcatcgcgaatcagaacatcccattcatcaataatcacaataaactttctgctagttacagtattgatccgtgccagtgtctctgccagggaatgattttctgccggaagtacatcaggataatattctcttaattctgaaattgtcttttctgaaatataagaaacaactttctcaggaccattggcaggccccatgcaccattgaatatcccaatgaatcacatcatactgattcagatgttttctaaaatcttctgcctgactgatttccagtctggaaaacatttcttctgaatcgcatcctttgctgtaatacgctgtaagcatatttgcagtaacagattttccaaatcttcttggacgactattgcatataaaagcatctgttgaccccagaacactgtttgtataattgaggattccacttttatcaacatagatccttgcattcaaagctgcctgaaatgccagattatcaggattaacgaacattcccatattgacacacatccatttctgtgacatgctcccgccacttaaatcttacagattttgaagtgggggcttcctgctcaattgcccttcaggacaaagctaaaacaggctatccccgcgtgtcccgcggttctttttttatccggttatggatcttttctgtgctattatgcacattttttatatattctttttccttctttcagaatattgaccgccgcattcacatcccggtccatccggtttccacattcgcataggtatatccgttctgataatgccagctctttcttcttatgtccgcatacgctgcatatcttactggatgcaaaatatctgtctacttttatcagatattttccacgttcttccagcttatatccaagcatggaaaggaactgactgtatccgttatcctgtatcccttttccgaaatgcaggcctccggctatccccttcaggttcagatcctccacacataccgcgtcatagtcttctgcaaggctgtgactgagcttatgctggaagtccttcctctggttctttatcttttcatgatataatgcaatctttttcttctgtttctgatagttacggctgcccttttcacatctggaaagctttctctgttcccgggcaagttttttctctgcattccggtaaaacatgggatatccggccctttcaccggtggaaaatacacacatcccatgcatggcaaaatcgatccccaggaatttttccgcctgtcttttctccactgtttggttttcacagtcgaacagcaggctggcaaaatattttccggacggttccctgctcacagtcactgatttcagcttccatccctcctggatcatacggtggagttttatttttaccggctgcatctttggcagtttcaggaacctgtcctgcagacagatattcccatttaccatattcgttgtataggatttccgcgaatgtttttttgatttataatgcggaaatcccactcccggttcccggaaaaatttccggaaagccccttccagatttaactgtacattcgccagcgcaagagaatctacctctttcagccatggatattcttttttatatccggccggcgtatttttcagcatctttttttcttcctgataataacggatcttatccgcaagcatccggttataaagaaaacgactgcagccgattgtcttctctatctgggttatctgttctttatttggatagatccttatttttactgcccggtttatctttctcaccctgactctctatatactgatggattgtttcaacaggtgctatatttcataaccagaatcaaataaaaacactgaatgagaattattatctaaactcattatgtacactcactcctcgaccgcccaaaactcaagagcatattgttcttttttctattataatatatttcttgtatcagaacaagtgtttttgtgattttttatgaatttttatgcatttgagcagatatgctcgaatgtgcaattcatcccatcacctataggacgccactgaaaaagtggtaagtttagtatcacagggtgtcaaatatgtgcaaaaatgttccttgataataaaatattgctaaaatagtgttttgagggatgcaaaatctacccttttgagagatgaattttcctatttttcctcatttgggcagacttctccctttagttttaaaattcgtcttaaattgactgcaaatattgatactgctccttgaagttgcatgtttgatagtccagcagcatcacaacgactatatccgtgtatattttttaattcactattttttgcctctatcatatagcgggttttgaaacgttccttgaaatattgtgttttttgaaacgcttcttgatttttatgataatctgatttaatagtgatactatacgttttgttttttgcattttctttatagcagccattacgataaggacagacatggcatttattaatatcgaaaaaatatttgatacgtgtattctttttctgattactacgtttgtcaattcgatattttatagccaaatgccccgctgggcactgcatggtatccgcatctttattaaagataaagccgtcctctgaacgagtcccttttatgatgctcgggttaagctttgaaattaatttatagtcattgctttgtgcatcttttaaattttccagtgtggaatatgcggtatctgctattacttcattaacggttgcacctgctgctttacttttttgaaccagtactggaagttcctgaccatcaaatgcttcgccggatgtgattgttgctgctgtgataatccgttcatctgtcatggccaaatgagttttgtatccgtaaaaagaagaattgaccgttttatggccaatccgggcatccgggtcaatggattgatcataacaatcaatctgattatccaaaatttcggataacatagaagattcttctttaatcgttggcagttctgaatacggactttcctgaactgtgtttaataattcatgacagtattcattatactcatctaaagaagctcgtttttcaggttcatctggcagataaatgtctttatcagaatcttttaaagctgcttttaaagaagtagaggcttttttcaacatttctctctgagtagttttatgataacgggcttctgtatgagttgagtcaacaattatagtattgctttttaaaacaccttgatttatggcaagttctacacttttatttatgagcagatcaagtatattttcatcttttaaacgctgctttctgaatttggttaaaagactaggatggataacctcttcttctggcgttaattccagaaaatatttaaaagacatatcatatcgtgatctttcaacaacaccattatcagaaaggttataaagatattttaaaagcagatatttaaatagcaatatagggttttttgcattacgtccattatcaaggcaatatttattttttaattcatcatatataaaagaaaaatcgaccaattccctgatttttcttagaatatgatcttttggaacaatcatgtcatataaatctgaataataactaaggctaagtttaagttgggatgataacatttcaacctccgacaattatgataccttaattatatcagatatatgattttacgaccactttttcagtggcgtccctatagaggtgagggaattcttgctacgattgttaaataattgcaaaaaaggtttcaaattatcagaactcttgatgagataatgataacatgaaacctttttgcgtaaagcggtatgttggatttgcttcatggggaccgcttcatattttatttttatgcacatcattctttatggggtctgaccccaatgttcagcaatacccacacggtcacaatccgaatcagttaccaacaacaggtcagcgttgcacttcctggcatactccattgataagcatccggtatacttcaaaatatttgcagcgtatcaacagctccgatgccatccccggacggtacttcagaacccgcagcggctgtctcggctctgcactgccgtgaagatctgccacatccaacgccttgtcgatatgcagttctcttttcttcccgtcctttcctatgcggtcgtaatcatacagccgataggtcaggttcgagctttcctggatttctgcaacgagcgcacctgccccaatggcatggatcgtgcctgcagggataaaaaacaggtcatccttgtgaataggtacattctgcagatacttcatcaccgtgccctgtctttcttatcagttgtattttctatcttatttaccgctccagctcaaacttctgcttatcgtgaacgttgatatccgcgcccagctgtacttcaatcggaatgaaagtgatcgcatacgatccttatataaatgagactgctgctcaggagctaaatgtaacacctgttactttagaacagcttctcaaagatagcgatcttatctctgttcattgcccacttacaaaagatacttaccatcttatcgggaaagaagaaatgacattattaaaaccaaacgctattcttgtgaatacagctcgtggcggaatcatcgacgaggccgctcttatcgaagcactgcaaaacggcaagatttctggtgccggagtagatgtatttgaaaacgaaccagttactccagaacatccattactccatatggataatgtaatcgcaactccacatagcgcatggtatagcgaaactgcaattcatacattgcaaagaaaagtagccgaagaagtagttaatgtattaaatggtaatcctccttttaattgcgtaaatatgaaataattgaagcaagcgtctcgtaactaggtaatcattcgtatattaacatcttataaaagccatctgatactgttcttggctgtctgccagattctctatcagatggcttagtattattttttcagtttagtacggcagtattccggaagatcctctggtagtgtaaaatagtttgtgtttttggattataaagtgccacagcactttccatctactctttcaggttctttccggcattgtattcaggcttcagcttcttccggccaccgcctggttttcttgttttcttcattttactcatgcaactccaacggcagtccatccgggtcatggaagaaagtcatcttcttgccggtgtaatcatccatgcggattggttcacattcaatccctacctccgccagctcattcaccgtctgctccacgctctccacacaaaatgcaaggtgacgcagcccacaggcctccgggcggttcgcacgcttcggcgggttttcttctgcaaaaatctccagctctgtgtgctcattgacacgaagatctagcttccagtccttacgctctggacggtagttttccctgatgacagagaatccaagcttgttcacataaaaatccttagcaacttcgtagtcagatacgatgattgcaatatgatgtatttttgataagttcattttctcacgctccacttctttaaattttgttcttcttttattttcgttataaactatacggcaaccttcaaaaaataccgtgtgaactcctgaagttcagtttgtccacacggcatttatttttcttggattcttgtttatttcagtttttcaagaatctcgtccgcactcataccgccggctaataatctcttaaccacactctcttcatggggtctgaccccgcagtgctttattaatcccgatttttttgaacaaatcttctatctttataatagcttgttctgtttcagcctttgtcattgcagattgggaagctttcgctttgcgaaattcttcgatattgtatgaattctcctgtgtgcacatctgcagatacatattgagtaaacatagttctttctcagaaaaatcctttactaattttctcaattccgcatcagaatatgaagatattggttttgaatctgtagcttcctcatcataggaatcgtaagaaaaatatttatttgtaacagatattacttcataagagaaagaggattccataccaagtttaacctgatagtttaatacagtagggattgtgcaatgtaaatatttactggctaattcaacagtaaaaggagttcctgattcttcacattcctgctgaatttttttgattttttccagttgattagctagatatggagttgtattatattttttgaaacttacgaaaatgcaaacagcatgttttatagaatagcgaaaaaatgtagtcgctcttccgagatcaggattaaatctgggcaagtctgctaaaacttcaacccataatgactgatataactcctgaaattcgcatttttcgagtgtactacgataactgtaatacagttcatacattatataattattcaaatactcataaatcaacttatctgctttatcgcgacttcttttatcagatgcatttcttttcatttgtatataagaatataataaatatgcatcgaaatttggattcgtcttatatcttttgcgttcagaactgttcttcataaatttatcctttcatatttgccatacattatttcatactgctattcataggattctttcctgtgtatatataagttccttaagcatggcatcaacaacagatttcggactgtaaacatggccagtccaaaagaagaatcctttcctggattcaaataaattcccattctttatggggtctgaccccgagagtttttccaaaagtgccggattttctatgctaagatggaggagccggttactcctccataactttttattcctcagctaatctttcctggatatatgtaagctccatcatcttagttttaatttcttctttattgagaagttttgtcttcatggggtctgaccccgagagtttttctatcatcacaaaagcgtatggcagccgcccacgcttcaaaggcattttccatcaatactggtttcatatcttgcttgttcttttctcttcaaaagacaggtacccatgtcaacgatgggagaaacacgttcatcctaaccgttaacatgagcggttcacttgctatttaaaatgattgagctgtttctaactcgcaggctttatcgtacagattatcataatgcaaagtcagaatgttttgctgggttactttgtttcgacgatcacgataagtagcttcgttgtaatcctcacgcaagcctgcgaccacagcgtagtggaagcggcttgaatcatattctgaaaattccttcggaagtgaggatttgttgctgtacttggtgatcgttacaaacgatgcagaaaagtgtgcttcgatttctgctttccaatcataaatttgataagtaccttttctaaaggtttctccctcgtgtccagatttcaaggttgttcttccattagggtgttcaagctcgacaaatacaaactcatatccgccagagctttttcctatcaacaaataatcggcaatgtacttacctaaagcaaattccgggaagacatatgcatcgtggtgaccaaaattataatacttaaatacaccagcaataatatgataagcaggtctgtgattaataaagcgaagaacgtttctttcgtttgtatttgcatcatgaatcaaggcacaaaattcttcatttagttgttccatattaccttcgttctggaaatcaaacaactcaatatgattgttagggaacaaactatcatagtgtcgaactgctgctggatacaatcgcctatgatttatcttcccaaatcctctgtctccgacagcttttctttcagtacacaaaataccctcatacagttgcatttcctgtttggtaggaacgctctttatatagtctcgtttatataaattcatgatacttcctcggataatatcaaataaagcttcctcatggggtctgaccccgagagttgttcttgccagtctggatgtacagcttgccagcagctccttaaatactgcttcggcttcagctttctttgctacttctccgcaatctgggatgcatagttgttccacaaaacaaaacattcgttttatgtcttttattatgcacttttcttttccaaagctattttttctacttcttccagagtaagctctgtgtacattgcaatatcttcataattaagtttaccatcttctatcattaaacgagccatacgaattgctttcattttttctgcttctcttgctgcttcatttctcatatcttccatagctttacacataattgccactcctttctcatcttctttaaaataatgtacacggtcagccagcacttcgtagtacatatctttagcattggtacatgtaaaatcatgcataagttttcctaatgctgtttcatcttttatttgagagtttacatatataatatgcgattggtcattgaacatttttcctgtttccctaacgatacgatccacatgatatattggaatattctctcctaacacatcattttctgtgataaaaaccacatacgtttcatttaaattttgatattgttcacccggttctgtcacatttgcatcaatcaagctactattatatctagctctcttcacacctgcacctttatcatctctttgaatttcaatattatacacctgattttgtcgatccactgcgagaatatccaaacgaacagaacgcccttgtaagttttttattacatattgactgctcacacttgtaactttaagatcatctcgttttagtataatctgcaataaaaattccacacaattcttatcttcaaatactttgctcataaaatcatcatctaaaagacgaaagccacgtaatctttgaaggtcttcttcgtgcttttgctcaaaatcaaatctttcttcctcattcattggtaacaccttcttttctcagcttatccacatcttctatactaccatcttaacatcaatacacccctattacaaggactgtatccgcacatattttactttctcttggtcagtttattcaggtaatccagatttgtggatttgatgcgtgcctgttacaatgagattttttccttagatgatttccggtaatctgtccagcgttttttattgaacaggatgatgtccatgatattcatccaacttacgcacaaaagaattccacgaagctatctctaaattatctgctggtttacattttacaatttcgtggctttcttcaattgacttgtcttctctttcaactccacctatagctatatatttaacatctatatccttctgtgggtcaaccaatagggtttttcgaggacccactaaataatttccactatattcctcattgattgctttatccttatcttcatgtatctgggttctgaatgaactgtaatttctgtttatgtattccatatgattttttaattgtgtaattgcatcattcatatgtacatttaaaccctgatagtgattggccttaacaattttaaaatctgcacctttgacttctacaatgcagactttcatttttgatcttgatgtcagcactacaaaatctgcaattttatctccaataggataattagaaaagcagatatattcctcatgcggctccgccagataatctgccatgccataccatgtatcatttgttttcagaaccttcacagatatcttcccatgctccagcagttcaccgatgaagataggaatcagatattctgcctttagtggattacccggcacttccttctcgaagaattctttgaatccctcttccagcgttgtaaggaaatcaggagttaagccccacatattcatggaaaccagagaatcaacatcaacagccattccttctgcctctgctccagctgcggtctttacaatgttcttcgtttccacgacctcggtcaggttgtaatcctcatccatcttgcagataccgcgagtcacgccaccgttatcagacagcgtgttcttcagcacaaaacctgccatacaggacttgccgccattcaccagatactcatgaacagccttgaaaccttctttgccatagtaatcatctgcattgatgacgatgaacggggtcttgatgaccttcttcgctgcaagcacggcctgaccagttccccacggctttgtacggccttccggcagagtccccggaatatcgttaatgtcctggaaagcataatccaccggctctaactgcttgattcctgttccgaagcggctgccaataccagctgccatgataagtaatgttgttttcataattctccttttcataccttgtagcgcccaatgtgccttccacaaaattttatgtagttattagagcagcgccagtagcctatgctctcgttttcgtttatagtttctttagagaaaaatcatttcttcttcatggggtctgaccccgagagcctgatttcatggggtctgaccccgagaggctattctcaatatcttttacaaggacaatatctcaaaaatcatagctttttctgtccatatctgttaaaattgacaatgattaatatacaggggctgctgcacatgcaagtgcggcagtccctgtcgaatggatgaggaaaattaaaatgaacgcaacagcaaatcttggcaaggcacccgtacgcactctggtactccagcttgccatcccttctatgaccgcgcaatttgtcaatgtactttacagtattattgacaggatgtatatcggacatatttccgaaaatggcgcactggctcttgcaggtgcaggcatatgcggtcctatcgttacacttctcacttcttttggcaccctggtaggaatcggaggttccattaccatgggaatccgaatgggcgaaaagaatcacaaaaaagcagaacaggtactggcaaattcttttctgatgctcagtattttttctgttctgctgactgtcagctttcttctgctaaaagataagctgcttatgttgtttggcgcaagtggggctacttttccctttgccaatacctacctgactatttatacaacaggtacctttttcgcactgatggctacagggcttaattactttatcaactgtcagggattcccccttgtgggaatgtttaccgtactgatcggcgcaggatgtaacatcctgtcagacccgatttttatttttggttttcatatgggaatttccggtgctgccattgcaaccgttatttcgcagatactctcctgcatctttgcaatgaccttcttattgggaaaaaaggttcctgtaaagattaccttcggacagtacaacttaaaagtcataaggaaaatcctttccctgggattttctccttttctgatcctggccacagacagcctgatcctgatctttatgaatacagtgctccagaaatatggtggtgcttcccagggcgatatgctgatcacctgtgccaccattgctcaaagctatctgcttctgatcacctcacctatgatcgggatcagcggaggtacacaggcaatcctgagctacaattacggtgccagatgcgtaaacagggtcaaggacgcagaaaggaacattctgggagtaatgcttatctttaccaccatcatgttccttctctcccggtttattccccggtactttgttcttctgtttaccactgatccacagtatatcagattctctgtctgggtcatccgtacctatacactgatgatcattccgctaagcttccagtatgtctttgtagacgggctgactgccctggaatgtccaaagacaggacttgcgctctccgttaccagaaaatctctttttgtgatcagtgcagctgtcctgccttctttctttggtgcaaaagcggcttttttcgcagaacctgttgctgacggaatctcttctgtcctctcaacaattgtattcctgcttctgatcaaccgccacctggataaacgctgccggatggacaagaaagagagcctgtaaattactcctgtatctccgcatttgagagatacaggaataagtatgattgtgcagcaatctatcagtactgctgttttctggatctcctccaacgcaaacagactgtccggttcattgcccacatagcgtcccaccacatcacggagaagatttctcgccagacgcctcctgtagacatgatctgctccattgccagtacatgggcatataaatcttcttctgtatatgcgattcccataaattcaaacactgccttcacacaggctgccgaaagaatagatgaggtgccaagaccggaacctttgggaacatttgttacctcagaatgcataacaaaaccactgccaagacgttccagtatttcacccagagtatgtccttccctgggaatgatcccacaggcaagaagacaagccttctgcagggcaaaaggatcataagggtcacctgtagcctgcaaaggctcaatcgtgtcaaactctccatgaacatccatatcccggctgtcaaaaaccaccttctgctcaggaatcctctccaatgtcacctctaccggcttctccccgttcaaaagaatagcggcatttaatacagtcccgcccttttcattacaatagggcggcgtatcactccagccacctccccagttcacacggagcggcagcctgactgtatgatgatctgtaacaatccttgcctgctcattataagcaagacttttaatcgtcgcttccagaacctctgactgaataatgcggaaacattcctgcacctcattctcatcctcaaggatcactcccagataataatgcagacgttcttcatggggtctgaccgtgcgtccagcaaagggtatatagtccggtgggtggaagccccatcaaataagctgttaaccacagcatttgaagcgagtcttgagtctgttacggtaacgtgcaggctaagcgtagacagcaagatagcagggatagctatggagcaccgaaatcccaaagtatcagagggtcgacaccgtggtctgggtggaagacaatatatgcacttatcgttatggtgagattttgcatgcctctgcggtgttgttgaaactattcatgtcagacagggactatatgtcaactggagaggacctgcattttcttttcagagtgtgtaaatgaaaagtatgtccgccaaccaaaagaagaaagacaaacgaagtgcaggtagtcggaggcccgaacagtaccggtgaaggtatgaacaaaataaatactggagggaagtcgagagagaactgtgcctcgcagttctggcctgcgaaactatatcaaagaggaaacattagctatacacagagataggggaactaatggaaacgaaattggcgagaatatcacaattatcaaaagaaaacccagacatggtctttacatcactggggcatcttatcaataaggagatgcttgagaactgtcatgtccagatggatggaacgaaagccgtaggaatagatggagttaccaaagaagaatacggaagaaatctggaagaaaatctagaagcccttatagaaagtttgaagaagaaatcctataagcctaaaccagcaagactggtagaaataccaaaggacaatgggaagatgcggccacttagtatctactgttatgaagacaagctggtacaggaagcactgcgcaggatactggaagcagtattcgagccaatgttttatgatgagatgatgggattcagacccaacaggggctgccataaagcaatccgcaaactaaacataatgctggaaaggaaaccgacgaattatgttctggatgcggatataaaaggattcttccagcatcttgaccatgaatggattgtgcgttttatagaatcaaggattaaagacccgaatatcatccgccttgtcagacgaatgctgaaagcaggaattatgaataactatgaatttgaagcaacagaggaaggaagtggacaaggttccgtctgctctccgataatttcctgtatctatatgcactatgtgctgatatggtggttcagagaggtggtaacgccgatgttaaagggatatgcaggtctggtggtctatgctgatgattttgtggtgacattccaatacaaatcagatgcagtatggttctatgaacacttaaaacatagaatgggacactttggattaagccttgaagaagaaaagagcaggctgatagagttcggacgatacgcaaaggaaagatgcagtaaaagtggaacgaagccaggtacctttactttcctaggttttacacactactgttccaaaagcaagaatggtagattcagagtgaagaggaaaaccagtaagaagaagtttgcgaagaaatgtagagaaataaatcaactgatgggacacatgaaaacatggaaactgaaagagattactgctaaactcaatcagatactgactggttattaccattactatggaatcacagacaatacagaaagaataacagcatttcgataccacgtaatgaaaagtttattctactgtctaaatcggaggagtcaaaagaaaagctacaactgggtagaatttctgaatatgatagataacagctatccattggtaagaccccgaatatatgtcagtgtatataattgataaatgtgaacgattcgtttcgcaaagagccggatgcgggaaagccgcaagtccggattctgtgaggggcgtacgaccgcaaggggtgcgtctactcgacccgcagtgttcgttattttacagaaaaagtttcatctcacttgaagcactcagctcatatgtaacattgtgaatgaaacagataatccggcaggaaatctgccggactgcacaaaatgcctgttgatttacatttaaaactgatccagatttaacgctttccaatttttaaagaatcggcgtattcataccctttttgagaaattttataaattttagttcctttctgactacttaccaattctatatattgcaacctcaccaattcacgaataatctcttcccaatgagcaacttttcgaggtgcatcgctatcaaataaataactacctatagaaatagttgttcctattatactgtttcttatcattacgcgaccatctcgatcttctgaaagttttaaaatcatatcttcgacgtctgatgacaattgtgaaaattctattttagaaacttttgcttccaaatttatttcaagcatatctgcaataaatgaattacgaactctttcccatttgttttcatttattttgtttaaagcaaattccgaaagaatcttatctctcaactccgagagacgaatattaattgtagactcatcatcaatttttgttgctatctctcttggatcaagaaccccctttatttcagaatatggaaaatggggtaatagcaatactgtatattcatttcttccaacccacgctgcacccatttcatttaaacttgcaatactattgtagtaatttttagagagaacaaatattacatgtaaatcatatgtatcaaactgaccacgtagaaaatcaaaaatcttctctccgccaggaataccatactcaggtatagatgaacagaaaataccatcttcaggaacatttaaatcctctaaaaattctactattcttcgtacatattttacatcatccgatgagtgactaataaaaattttcacttgtttttccatccgatttcctccgttcgtaaccttgtccttattttcaaaatagttcttcgcactttctgtgacagtcattatcgcactattcccatacggaataacagaagccaacatcccatacattcgaagtgcttcatataataccagggcattgtctctcaaacttcttgaaatattatctaattcaaaactcatagtattattttcatttccatcatactgtcttagtatttcagcaagcattgtttcggattcaaaatccaatattctaaacccattttcttgatgagcacctgccactattccagaggcgcgttccctgatttgagctgcacgttctgctttttcctgtgctctcatttgtttttctatggctttttgttcaggagattttgtcacaatctaacttcctattctctcttttctttttagtgcatgttcaataaaaagccttatttttacttatttcatcgaacaattaataagttacatatacaccaaacatggtacataaatcttagattatagctgtattatctggtctttaatttctttctcagtaaatagtaaaaatcgtaataccatttacaaataaaaggtatcttaattaattcttttaatttcgattttcgtcctcttatgttaggtatattccatattatggggtctgaccccaatgtttttctcctctttaggttcttatgtataaagttccatgcatctcagccgaccgtaagatcgttgcctgccgctcaccacgaagaggtgtgcaaagtttcgagcggcgtagggagctacccacgctcccagtatatcacaatttcatccagttttacagacgctttcttgccttcatcactacacagtacaataaaccaccgagcactccgccgactgtgttatagaagatgtctgatagctggaatgttcctagccgcagcaataactgcagcatctcaatgcttatcgaaaagccaaatgctattttaccactttgccacagtatcttcttcccgccgtttcctatcttctctccgaatgtccacgccactactgctgaaaacggcaccatcatgatcacgttctcgatgcactcggttgtcagcttctgttcgccgttcactgtctcccagatgccccatccacccataacgtcagataacgggttcatccacagatttcggttcagtagcgttctgaacaagatcatcgaagtcacaaacgccaataggaacagtttccgaaagaacacgctctctttgaacttctgataccatgtcactatggcatttttccatcctttgcctgctgcggcaggcgcatacgcatacagatagaaaaacatggcgaggaaggaaagaaggagcgagaatccaaacggctcatagagagcagttagaatgtttgtgaggattttggctaatacttttattacttccattacagatcactgaacaggtcagccttgtacacaccgttctccagcatcctcttgaagctatcctttactgctgcgacatcctcatgataggtcatgccataccatgtatcatttgttttcagaaccttcacagatatcttcccctgctccagcagttcaccgatgaagataggaatcagatattctgcctttagtggattacccggcacttccttctcgaagaattctttgaatccctcttccagcgttataaggaaatcaggagttaagccccacatattcatggaaaccagagaatcaacatcaacagccattccttctgcctctgctccagctgcggtctttacaatattcttcgtttccacaacctcggtcaggttgtaatcctcattcatcttgcagataccgcgagtcacgccaccgttatcagacagcgtgttcttcagcacaaaacctgccatacaggacttgccgccattcaccagatactcatgaacagccttgaaaccttctttgccatagtaatcatctgcattgatgacgatgaacggggtcttgatgaccttcttcgctgcaagcacggcctgaccagttccccacggctttgtacggccttccggcagagtccccggaatatcgttaatgtcctggaaagcataatccaccgtcacatcatgggcagcgcagatagctttgatacgctcaccgataacctctttgaactcctgctcgatatccttacgtatgataaataccacatggttaaagccagcctcaagcgcatcatggatggaataatccatgataatatgccccgcatcatccaccggctctaactgcttgattcctgttccgaagcggctgccaataccagcagccatgataagtaatgttgttttcataattctcctttccataccttgtagcgcccaatgtgccttccacaaaattttatgtaattattagagcagcgccagtagcctatgctctcgttttcgtttatagtttctttagaaaaaaatcatttcttcttcatggagtctgaccccgagagggcaccgtgacacgggagcaaatctgatgtatgattcacttgagttgcactttattatggaagttcacattttaactctctcttcatttatgtatatatctttacatatgtttgataattcctgcaatcgctatctgcaatggaaaaccgggattttttatgattttatttcgttctttttttctttaggtggaaaaattactggaagttcacactttatttttaacaaaacaatgttttgaagactaaactacccttcgttttgtaaagccgctaatatttccgtacattttttcttggcatcaccgctcaaaattccaacgtaatcatgtgaaagtttaagcaaaaactttttccagttttcaattacgatacctttattctctttggaaatgatatggctcatcaagtcgaacatttcacaccaaaatggaagttctcgaaccatggctgaaatcatttcaacaattgtcggtaagtcagcatatccctcctgcaactcatcttctttcttatagaatgccaattcatctttataatcttcgggttttttcaacaatgtccaaaagctgtctggagcaacagcgttgcttgcaaacagttcatgcaccagctttttatttatttctctatctattgggttgtttatcggtttgattttatcgaaaatcattagaaaaattctaaattttccatcactttccattttagccatttgaacaaccgcattcaaatccaaaatcaattcatcagcctttctctctaagtccaccgaatttatcattcctgtatgtgctatttcatttcttagaataggaacatcaaacgcaaaatatggataatatctcataaaccctatattgtttccagcccgaagtgccttttctgctttttccaccagagttcctgcattttctttttctccatatataattgaacatatatcatagaacaatccctccaactgaattaaaccgagggagagaaacgattgataatgcctttccctatacaagctgactaaatcatcaaatatttcatgacgcctgtgcaaatgataattcgtatcaaccgctttttgaaccgttccaatgatatctttattacaaatgatctttttaattgtcacatagtaattttcttcatcagactttttcaattgcagatactttttttccacacgaaagctgtcctcaagttgaacatccgggagatatgccgcttttacaattgttgaataatcaaaatcaacgtcataatattctggaaactgtgcaaaaaggtatctccttttcaaaaacagcttccctaattcgtcatccctaaattcaatatcaagtgttctttggtcttcttcctctaaatagcccgcaacaccgttatttaaaaagtgcacaatatcatttaacgccttcttattctgttttgaaaaatagtccagctttcttctcttatactcagctccgttactcttgtctgcttcaatatcatttcgccgctttttatatgaaaccaatctgttatctatggttcgtaaatccgaaataaccaaacacattaaatggataaaattatctcttagaattgttttcttttcgtcacataaatgccccacgtctatatcgagtaactttagaacgtactcgcccatatcaatcgaaatatcattatcttgtttctgcattatccccattgcatctataacagtattatctaatttcccaataacattcatactcaaggctatttctcctctcacctcacatctcagccagccataagaccgttgcctgctgctcaccacggagagatgtgtgattcattcgagcagcgtagggagctaccgctctccttgttttgtttataatttctttagaaatgtttattttttctttatggggtctgaccccggagtattagaggcagacccaagacaacctaaactaaggtcatctaaagtctacctcggcttaccacgcacactatgctttccagcatatccgggcagcacctgcaggcaggtgtaaattcaatcaggctggctcacacgtcctgcgatgagtcaagcggttaccgggagcagtcacatcctgagctgttcctttttatcttcaaaggtcatgtatggaccagaataacattgctcattaaaatcatccaggtactcatacccctgcaattgcccgttcttcacataagcaacagccttacggccatttacaaccgcacgggttgcaaggagcacccgctttccttgcgacgtataaattccacattttgaaatcaatatcctcatctcccatcttgtaccttaaacactgacttctctgttccatcgattcgcggaatgcaaaattcatctttcacacatcggttcaccgggtcgattaaaataaaggaaaaataatcccttattttgcagccagcataatactctctcgcctgttcaatcatagctacatggtttactactactgaaaccttaatgccatgctcacgaggactctccatatatgccatcgcaaacagctgattcatcttgccaatcgtaccccttccgattcccgctgtataagatttacactcaaacagccatgtatcaatgccttcttctaaaagagcatttgtccgaattgcaaaatcagccctgtactgtttggttcttggccagatcatattttcgtaggaaaccaattctacaaaatagccgttcataaggaatgcgttctgcagcgtttccctgtaagtttgctctaacatatatccggtaagcgtcttcgctgcattccgtaagaacgtatttgatgaattgggatctggctcaatattctgctcttctgcgatatccgccaatccaaaaacaatctgagatggagatacaacggctccttctgttccagcaggaacaagtttcaccattccgtttgccgccaacagtttctccagtgtgaccccactgttcggatctgcagcctttgatatcgccaccagcacctcatcagaacaagccgttgtgttcttcatattaataatacgggaaatcgtcgatgtgtttaccccgcactcattcgcaaagtcattcatcgaccgttctccctttgcactcagaaccaactgactcagcacttctaggtcagcctttcccgtccgaatgtaatcaggaaaaagattcgttatcttctttcttcccatcggtgtcacacctcctctgtttatatagtagcactgtattgcatacttgtcaatatcacgcaacgattttatttttttgcttttattgcgtttcttaactcgaagttgcgttatgctaagtccatgttacagccacagttgcatcccataccataataaaaaggaacagaagttcatttccctattgacttctacaacttcttattgtattataggaacagaagttcacgaactgttgttcttagtatataggaacatccgttccttgttaagtaggctttacaaaaaaaattgctgcttctcaccggccactttcccttccggcaaaaaacagcaaaatatcccacatggaggcatgacatgaaaaaagatacgaacttactagacgcacaggatgtccgggctgaagcagccactgcacttacaccgaatgcgaccaacggcgaaaaaatcaaagctctgcgaaccgcacaaggtatgagcatggccgaactctccagacgagcatccatgtctgatcgtgccatccgctatatcgaagccggcgagcgcgaaccaagcgtggacgcaatccagaagattgccgctgctcttggtgtcacgaccgactactttatggacgatgccaccttccagaaggaactcagcgatgatcaattctacgctgatgtccgtaagaagtatggctcccgcggtgtagcgcaggcaaagaaaataaaagaacagacctctgccctctttgctggcggcgagctgtccgaagaagatcaggctaatttcattaaggaaatggaagccctcttccttgacgctaaagaagaggcaaaaaagtttactcctaaaaaatatctgtaattgaattgcagaggaaaggagtcgccgttggacaactttgctattactgccgccgacgctgtaagccgccgatacaagagcaatgatccggaagctatcattgcccagcgcgccattaagattaaagacatccggttctgcgaagagctccttgggttttacacggttcttctaaattgcgaatacatcggtatcaatccaaactgctcaaagcaacaacgcagatccgcactggctcacgaacttgggcacgccatcttcgaccggaaacatgcggcatccggtcaggctttccaggatacatatttttatagtcttagcaatgcaaaagcagagcgcagggcgaatacatttgctgctgaactgctgttgtcagatgatgatgtgctgaagccaatcggcttctatgaatttaacgccgacaggcttcagatggaagcttctctgccaacccactgctccagcacataccgtgccttgaaataccacgagcttctgcaggactttcaatacacgcatacaggattcgccacccttgaggagatcgcacaggtggctggaatcgaaaaaaactttgttgattttaaactgaacattcttaccgcaaaagggtaccagcttcctgctgtgccggagctcaagagcaactttctgaaggattctatgaagaattgctctaaaagctacgattaaacatggaggtgactgcttatgacaaaagaacgagtctatgtaaaggtatcctccgactttgattctacaggctatatgcagccgacatcgatcacctggtcggatggacgtaccttcccaatcgaaaccgtgcgtgatttccgccccgccgggactgccgataacggttactctggtgactgttttactgtgctcatccaggggcaagagaagcatctgttctttgagcaccttgatccacgcttcaacggtcggttaggccagtggttcgtcgagagagccggacattaacagcaaaataacacgagcacatagaaagggggaatcacacgatgcaacgcacatatcttgcgatagatcttaaaagctattacgcgagtgcggaatgcgccgctcgccacctcgacccgcttaccacaaatctggtcgtggcagattcctcccgcactgagaaaactatctgtctcgctgtgtctccttccttgaaaacctatggcattccgggtcgcgccagactgtttgaagtcgtgcagaaggtcaaggaggtcaatgcaaaccggttaagggaagcggtacgattaagaaaagctgtgtataaggacggtaagccatccttctcctctgcttcctatgattccttatcgcttgccgccgacccgtcactcgaactctcttaccttgttgcaccaccccggatggcatattatgaaaaggtgtcgcggcagatttatggcatctatctgaaatacatcgcgccagaggacatcatggtatattccattgacgaggtgttcatcgatgccaccccgtacctatcccactataatatgaccgcacacgaccttgtcatgacaatgatccgggaagtgctttatacgactggcatcaccgccaccgccgggatcggtacgaatctttatctggcgaagctggcaatggacatcactgccaaacatgctgcgccggacaaagacggtgtccgtatcgctgaactggatgaagagagcttccgctatctactctgggatcacaagcctctcactgacttctggatgaccggtcccggcactgtcaagcgactagaaaagcacggtattcatacaatgggcgaactggcatatttcagcaccgtcaatcaggatatcttatataaggaattcggtgttgatgccgaactgctgattgatcatgcttggggactggaaccctgcggcatgaaagaaatcaaagcctacaagcccagcactaacagtatctccgagggacaggttctctcctgcccttacccgtatgacaaaatcagaatcattgtcatggagatggcagacagcttagtattacagttgacggacaaaggcctggttacggacagcctgacgctggatgttggctatgacagggaaaactgtgacagcggcaagtacagaggtccggtacacatcgaccactacggccgcaccgttccgaaaggtgcccatggaaccgtaaaattagataacccaaccaacctcggcagtatcctgatctctgccacaactgagctgttcgagaaaatagctgataaaacactgaccgtaagacggatcacgatagccgctaaccgtgtggtcaaagatgagggcttcttccaagtcgacctattcacggacacaactaagctggagaaagagaagaagctgcagaatgcgatgctgggtctcaagaagaagttcggcaagaacgccgttctgaaaggaaccaactatctggatggtgcaacgatgagggaaagaaatcagcagataggtggccataaagccacgtaaggagggggaacatggactataagaacacaccggaaggcagagccgtccaaggtaggtatggcaaaatactccatgcttcccgcccggagccaccgcataatcatccccggatgccgatgtcaaatcgagctaaaatcttctctccgtttgccgccttacgaggctatgaggatgagattgcttccgaaggcagagatcacctcaaaggaaataaaatcgaactgtctgaagaaggcaagcaagcactgaaccaaaagatcagccagcttcggaagggacaagagatcacaataaaatatttcactgacggctactatgaagatatagccggagtactggatgctgtggatgcgataaacaaagaactgcgaatttacacaggatttataaatgataccggtaaagaactgccgaccattattgcatttgaggatatattagagattggggtgaatatgacttgaattactacttttgcgacgcctgccgctactgcttctctgctgagaagctgccggatcgttgccctgactgcggagcacaaatctataaagagaagccagcagtgcgcttagcgagtaaaaaggaaatagaggaactgctcagaatacggaaagaagataaggaggacatacaaaaatgaaagcacataaatattggtcactcggcgcacttgcctgcatggcagggtgcttctacacaggctgcaagaagctgatgcaggctcataagtattttgcttgtggctctctggtctgcatgggtatggcaatttactccggccacaaaattgcaccgaagaagaaaaaagctgaaaagcctgaaaaataagaacacacgccctcgccgtaacaagcgagggcttttttgaactccaggaattcattttatttccatcacaaactatatgttacataccgtatacttccatcatgagtcgaattccaactttcaagccttcctcaaaagcggtcttctcccaagcacagcacaccgtcccctgccggtccatgatcttctcccaaagtggaatcttatctccgacgtagtcatctaccaacctatccataccatctaatccacgcagccactcttccagttccttttccttggcctttgccggtttaccggcaactgtgtttttctctactgggttattctccgtgtaatgctcgtagatcagatccagtagattctccactggcgggtaatactccggctcagttttcttcaaatactcctctagcatttccttcaatttctctataatgctaccatccttcccaactgagattcatttcctcagttacggcacatattaccgtagatttctacacatagcaacctattttttgcgttctttcggatgtcccatcttctccttcacttcatccggcacatcgatcagtccgaaccgatagaacatcccgtagatataagtcacaccccggatgtcacccagagctttcgggcggtctactacttcccctttaatatttcccagagccaaaacaatagaactccacgccagacttttactcttttcccgcctgtcgatccacagttctttcgtgtactcgccgttcctgccttttttaatttcgtaagaaaatagcaaaccagagtaagttttgaatttcacaccagcataagccagaaccactccccagaagttttcttctgtcggatcagccctccaccgcttcattgctctgtatctccgctgccgctctgctccaacactaattttttctttatcagcagtacttgggaagtatacacctttctgataaggcagatacgaggtaacagaggctttggaaaggttaagggtatgagcggttgatagtatggatgttttgtagtcctgcgtttctcggtactcctcaaaggtatcctgcaccttctccgccacatccgactcatatacgccggccgtgatgagcagtttccgtaccttgattggattcaaacccaactcatcaccaatggcctgcaaggacatctcagaatcataaagcgccacagccgcatccatctgttctttcaggttcttcccggcatcgtactccggcttcagcttcttccgaccaccgccgggcttccggggtttatatgctcttttctctcccatagctcacagcaccagttcatacaatttaaacgtcatctccccgaccacatcataataaagtgtcttggtctggatatatcgaaagcccagtttcttatacagtttttcggccgttgtgttgttctcaatcacatcaagtcgtaatgccttcttgccagcttttctttcctgttcaatcacattctccaccaatctccgtgccagcccttttccacgatgatccggatgaaccgccagaacatgaagaacgatcacctcgtccgaatcaatctgccacggagcacctgcatagccatcgaccttttcatcgtttgctatgacacacgctgcgattttctcatcatctgacagcacatacagttgtcttgtatcaatgctgtcctgtatcatctcatcagaggggtggatacctttcttccaatgcggaaatgacgggtcgtcctgctcctgatcaatcaaggtccagtacagagatcttattttgtaaaaatcttctttttctgccttacgaaatatcattttgtctacctctttattcatgcagttccagcggcagtccatccgggtcatgaaagaaagtcatcttcttgccggtataatcatctacacgaaccggctcacattcaattcctacctccgccagctcgttcaccgtctgctccacactctctacacagaaagcaagatgccgcagcccacatgcttccggacggttcacacgcatcggcgggtttttctcagcgaaaatctccagttctgtgtgctcattaacacgaagatccagcttccagtctttacgcaccgggcggtagttctctctgatgacagagaatcccagcttgttcacatagaaatccttagctgcttcgtagtcagatacgatgattgcgatatggtgtattttagataaattcattttttcacgctccaattctttaaattctgtccttcttttattttcgttataaactatatgacggccttcaaaaattaccgtgtgaactcctggagttcggttttgttcacacggcttttatttccttatttcagcttttcaaggatctcatccgcgctcattccacttgccagcaacttcttcagcacactctcagcttcagccttctttgcttcttcagcggccttagcatctgcctttgccttctttgcttccagggatgccacttctttttcggtcctcttcagagcagacttcttttctttcaggtcagccttcaaagtgtcaatgttggcggtgatggatgcgatctcagtattcaaagacacaatggtctcctgtttctccgcgatctgggatgcgtagtcgttattagttttgggacggtttttgctgcctttcgttctgggcatcgtgataacctctttccttttttatagtggtttaagtatagcactgtgttgaggtgagggcaatatactattattgttcactattatctaccaacagggaaaccgccttattgtagacctgtattccaatcttactttcaaccaaaccgcataaaacgccaattacaagtgcaggcttgatatctgtaaaagctttggaaatatctacatttccaatttttacatctataagaccaacactcattaatagtgcaaaaatcaacgaagcaactgcaatataaatcagacggataactggcgtcattttgtctttttccaatgaagcaagatcctcaaattctatttcaaattttcttgcaccaaatgaaacccatgttcctgttaaggcaccaattataatacataatactgaaatacatcctatccatcttgtaaaatagaaacatattcctagcactacacttgctattgctccaataattaaggcgtctatccctaaatatttcatatagtggttcttgatacgttttccttctacaagaactatttcatctttcaacttcattaatgcaaattctgctgtttctgtctgtgccggatttgccacaagtccaacctgagacaaggaaagtagcttatcaaaatactttttcttagtttgtttatccgtattttctaatgctttaatgatattgcaggcagattctgcttttacatacagctcttgttgatcctttggaataacactatccatagttgaattaacttggaaactgatatcaaattcctcttcttcattttcacatacaagaaaatgtccttccattataacggtctcccacaggttttacacacatctcccgacatctgtaaggagaatccgattgtatcaattactttacttaacgactgaagttccatcaataaatgaagttcgtcctctgttttattttctttttctattagctgagcttttagttttcttaattctctataatccatcatagctccctcccacaagtagggcacactctcgttgacatcgaaaggctatgcttcagaaatacgggtgtattatcgagagtctcaagttcagcttggattttttctcgatcaattcttatatttgattctcctgcccggaggtcatttaaaagttttttcaactctggtgataacatatgttcatcttctttcaatttaacataaaaatctatcacatcttcgccgatcataatagatcgttgcctgctgcccaccacggagaggtgtgtgatattattcgagcagcgtagggagctaccgctcccagtatatcacattccactagctttcgctaccttgaatggacagactttcaaacactgatagcaccgcacgcacttgctttcatcaatctgtggatattcaaatccctcttcgtcctctaccatagaaatagcttctttcggacagatggcataacaagctgtacatccacagcattcttcttttcttttatatagtactggtaattctttttccatttttctcatcttcacctttactgttagccaaacaactctctaactaaacgactattctttattctattggcactaataatcaccgccaatacaacagttccaactaaacttgctataaatcctgtaaatccatatgatggttctttcccatcaattaaaccccagaggaaaaaaattatcatatgtgcataaaagacgactgtactcattcgtcttaaaaaatgactctgtgcatcagtcacttttttaactttaagattctgaacaaagataaaaaaagccacacaaacgctaagtcgcaaaaatacattgtcaataaaaacatcaaatataaaaagagtcacaaatataatgcacgaatatctgaccatagcattattaatccacttgctatacttctgtattaatgctcctataagcattagatatattccagaaaacactcttccttcagaaaaggtttttgctaaacacactgcaagcaatctactgaacccgtgaaaagaattctgattaatgaccagataatcagtgcctttcgatattataaaggaaatactaatagcccaaataaccctagatgtctgaaatccatttctgataaggaaataaaatacaatagatgcatatatagctgccagcaaataccaaagcggataagaaaaatagttttgtccttggaacaaaatatttctaatatataaaataccggatttaaatataccatatttatcaacagagaaaaagccgtagaacgcaagaggaaggtatagtatactccaaataaaataagcccttaacattttcagtatttgtttttttgcctttttcttgttatattcacagtcatatggcaaaattaattttccaaataccaggtatcctgtcgacataaaaaagaatggaacggataatgcaacagtcgtttcatataaatttttcccaattccatttacactttgcagcggctgtgtatgaatagcaacgacacatattgccattaaaaactttacgacatcaattgctctgctctgctctgctctgctctgctctgctctgctctgctctgctctgctctgctctgctctgctctgctctgctctgctctcaagattgtatttctccctttatttcttgtcaatcatgtcaaatgtgaaaagcatcccataaccggagacattttttacattactgtaccccccccgttatttttacgcaataatgcgtttcttaatatgtttttcactttttgttttagtggtatttttgcgtctgctgcatactttttttccattttaataaattcctttttttcaagatctgaaaagaacttattacgctcttttggtcttggggccgaagttatttccgatggattatatttaattgctgcattataatccacctttttataacatagcttttcttgaatagtatcaaacaaactttgtcctctctggcttctgataattacaagtgacacacctttattatcattcatttctggtgcaacaaaatttattccccagaaatctgctagagtcaaatccgcacatcttaccagttttgcttcacactcgtaacaagaaggtcttaaacaataatttcgcaaaaacattctcatgaaagaatcttgactactaggaatatatactttctttttgtcgtgctgaatttcttccattccaaaattcttccatccttgatccttacatcgaaaattcacgccaataatttttgcattatttatagtctctatatgttcaagataatgtctccacaattttggagatggaacaccgtgacataccacatcgatgcaatatagattctcatagtcttttccaaggtatttttttagaccgttattctgacatcctgtaccagaaaataatacaattcttccactattcaaatcgtttttgacagacttataggcttgaccaaccttagcttgaatatacttagagccacgtaataggtgtaactgctcgatattatcaacacgaacaaattctgcccctttgcagtcatcggtcatcgtaactccatatacaattccactgagggacaatattttttctgcgatcaatgaaaatatcgctcccgatgaactttgtttacgaatcaaatcatcaaacgcatatgccgcatatgtatttaaaatcttatttgacatcacttttctcctaaaattaggccgcttaacctaaatttcctttttgtcatcttatcaaccagcttcacacactctttgaactctctcaagcggtgatataaaccccaaaacacagcattgggaatcaaacagcttatgagtcctcttattaccaatgttagccaaagatttgaaaaagatatgcgattgcaaattaaatacgtaatcacacctaccaatgctactccagcaacatatcggcctaagtttattaaaaatccgcttaaatactttttatcaaataccgtagtaaaaagattatgtaagagccatggcatacctacaaacaaggttgcaaacacagttgaaagaagaataccataaatcccccaaaagttaaccataagaagattgagacaaaggtttgtcagtgcgacaacaagtgggcggaatctatcttcatgccaaattccagaagcatctttataggtattaaagagtttatttatctcctggatatagaagtaaacgcaaaaacatactaccgcgcccatgctaagcattaaatctttgccaacccataactccataaacggttgatatagattaaggaaacaacaaaggcacattccggatatccatgaaattaaaaaagtaaatttttttagatcattgtagtttttctctgcggtttccacaataatactgtttccgattccagctgtacacgaggtaaaaacaacagctataaatcccataacagagctcaaaatgtaaaaataattttgatatattgctaatgctgtcaacccaagaaacgctgagatgacaattgtatcagccgagtcgacaactacgaatccaatttttgatgtaaataaatctcttatcttgtgattaatctgttggatttcatctttatccagatttccttcaggattgtatcttggatacattttatctacaacaatcgctgtggaaatatttgttattatttgggttgccaatatagcaagaacataataataataattatgagaaagtactaaaatcaatatctgaatcgcatactgaaacgtatttgtaacaagtgttattttgctaacaacatctactctctgatgcgcttgaaggagactatttttgtaagcaaatagccaatacgaaagcactgttgcagctaaattcatcaaatatagaatataaatattcaaaccacttggaacgtcaccacttattagctttggaacaaacggagttaaaacaagacctacgccaccaataacaaagccaattactctataatataacctataaagtttcatcaatgcacaaattttttttgtatcatcttctgctatgggcttatacatgctgtaaaccatagcagatccaactcctagttctgccaaattcaaaacttgcaacactgatgtaaacaagctatttagtccaagatattgaacccccatgaaatatatcatggcagtacgcatcaaaaacggaactgcaatttgataaattttcaaaattattccaaatagaatatttctacttgcattttttgttctctctatcttcatattaacccacgctatccccacagctttgaatcgcttcattcaaatattttaggctgtggactttttctttctgaattgctaatctagcatttgtataatcaacttgtaacaacatcttttcatccaatgcagaagctcttcgatcatttaagccacacatctccagtaacgaagatagccttgagcccatctttttgccgcttccctgtctgtcgtacacaacaaatggcttttcatatattattgaaaaaacagtagcatgaaaagaatctgtcaaaaccatcttggctttgctaataagaccaacaaattcatctggccctactgtatagtaaggcgtattataatcttgcaagtttattactgcgctatctgtcaatttagcatatcgatatattactttttctacttctcgcgttcttccgcccaaaaaataagttaaaatatagttcttcccatttatttttgttggcatttttttaattttatcccattctgctctttccagtagcattgttggatcaagtactttatgacaagtgattccgatagtatttttaacaatatcaacagccttatcttctctgactgaaagtgccttaaaatctataagtccagctttatatttatcaacccatttttctggaattttatcaactccaaagctcgcagcatatgaaatacgtttagtcggagaacaaaatcttaaaaacattctgtcataagtatattttgcccaatctggattccatacctgatcacttccaactataaagcaatgatactcatcatcagatacgctactaaattctcctgcattgacaggaaatgtatttacatactttttgtcaaagtctagaaaattttttagccttcgtatctttttcatcctatctgtgaatttgatgccatctttctttataatcgtcttaaccgaagttttaaggagattaggtcggaaatcaaccaatgaaacaacatcatatccttgactcgtaataattctctctaatgcataattctgtaacctatttccataattattaaaatcactcaatgttacgatagctatcttcttcattggtcaccccatcctatttctaaaaaatattacttttcaacgattgagatactatagcttatgccttcgtacccccccccatttttcaaatgactatttattctgtcaagctgttttaataccacaactttgggatgacacatgaaaaaactcaaatcaaaccttttgcccttctgcagtaaagtaataaatttatctctcttaacagctggcttcgatggatgttttaattgatgatttgatgctacagcactttctaaatcaacggcctccaaagtcattttagactgttccaataaatccattcctttttctgtctgacaaagaactaacgagattccttttttttcttcttccttgatgtcacttccccaagaatcaccaatactaatatctgacactctttctaatctagcatacttgcagcgatagcaattatccgtgtaatccatgcaggttaaaaaagcatacgtatataaatcttgtacaccgacaggttcaagccttatcctttttccttttaatgcaaaattagttttacttctgaattctatatttccaatttgcttaatattatatcccttttcattcaaaaagcgttcaagcaacataggtgacggagagccatgacaaattaaatcaatcgtgtataacttctcttcatatcgtttacctacaaatctcttgaccgctgctacttgacatggtaatccaataaataaaatttttttacctgactgcaataattgcttaatttttttataaattcctttaggattgcttttcacatactttgagcctgaaaatcttgcaagtttgtttatgtcatcctcaaagtcaaacacaaattcaccttgtgaaaaacaacagctgcagagaatgcctccattttccacaaaacttcttgcgatagccgcagctgctccacctgaagaacttttttttcttatatttacatctgatgcccatccctgcttccatattataggtttcgacatatctacattattgttaacctgacaaacgtttctgcacgcattacaattaatacaccgtttttcatcaataatagcattatatgattttatggaatctttaatattaattgcatttttggagcaaacttccaaacaagccatgcatcctgcacactggtctttttcacatacagtcaccatattattttcctctttaacgtactgttcttgcctccaaatataaatcaatcacccttttatattgtcttaaggatatatgaaatattggcagtttatgtatactatcatgaaacatatcccataattcttttctgaataatgttactcctacatcctgcagtccttttgtccaaatcagaaatgacagtgcatatattgtctttttataattcatataaaccaagcaagatggacagttatcttcaacgattttactttgttcttttacgccccaaagccacatcttcaaaatggaaaaagatcttttagacgatgccgaatcaattctttcgagataatgatatccattgctttgaaatacaacaagtttttctgctctgcaatataaccggcaaagcataagggcatcctcacctattttaagctgttcaaatctcaactcattataaagtgctctttttaccaaagtgctccacaaataagctgtgaggttgcccatcaagtactcttgaacaattttctctctactatgtatgtattttatttgttttttgtattgtttcaatgcaattgagatatcagcattatattcctttacagcgtcatacaatttttctatatactccggctcaattgaatcatcgctatctacccaagctatgaattctcctgatgcctcagatagtcccttatttctcgctgatgccacgccgccattattctgatgaaagacttttattcggttatcttgtaaggcaaatttttcacaaatgcttaaagaattatcgtttgatccatcatctacaagaataatttcaagatttctataagtttgtcctacaacactcgttatgcaattttttagatatttttctgcattatataatggaataataacgcttatcaaatttttatcattttccgtcattcttccaatccctccctgtgcaactttctttttgcaaatactattccccaatacacagccatataattaataactgttgactcaataaagaaatagctgaaagttgcaaaaaagattgtaactatcattgaaaatgaatatattgcaagctgttccgtatgctctctaaactgatagtaccattctttaaagagcattgcgataaatgctattaacagaaatagaccaaaatatccataatcatgtaaggtctctataaaatcattatgtgccttaattctaacatcactatatatggtaaccgtttgaaaaactgaattaataccgtgtccaaatatttttctctttaaatcgctatttgaaaaacttgcaagtacctttgcccaaacaatatttcgtccagatccaccgtctgaactcaattcactaaatctgcctaaaacatcaattccaaacctactcaatacaagtacgagaaacgctataacaatcaatcccaagatggtaattttaacaattcgctccaatctctttttaataggtttcttcgatttaccatccgttaaataaaagactgcaaatccgatactggccgccaacattcctgttcgtttggttgttgcggcaataacaatcaatgaacaaagaataggtaaatagcgacttttatactctgttgcctgtaaaagtaacggtacaattgtcaatactagataggtggaaaaaattactgacccatttagacctgcaccagacagatgtatagcaatcaggggaaatgataatcctataagaattgcatataaaaaatacagcatcttcttactaactggaaattcaccatagtacaataccgaataatagcttgcagcgcaaatcggaatccacatcaatgtttgagatattagagtatgatatatttcctgataattcattcttgcagttattatagggaaaacaaaaagtaataataaaacaacgccaagacctagtggcatttttaggtatctatgcaacttgaatacggcaataataaatattgccaagatcattgttgctgtgcctataatatacctcttctctaggaaacttgaatccataccacttatataatacaacattgtcattgaatgatatactgttatcattatcagtaacaatgtaaccattacctttttaggtgaaactttccaactcactttatattctcctaaatattactttttagatactccaatgtattttttctatttaccgcaataatttcatttactgatttataatcaatcttggaattcaagataaaatccaaatcactaattgtttttatttctcgattgtttaagttaaatgtactcaacaaatcgtttaacttttcatagttcccatatttttcaccattaccttttcttatcaatgttccaaactgtttattgtatttaatcgaaaatacagttccatggaaggtatctgtcacaacatacgctgcattcttaataattgatagtacttcaaatggcttaggataaattgacacatcacaaaatgaatgctctccgcctatagcaatcagcttcaatccattcttctttgcaaagtgtttaatttcctttccttcctgtttagttattctgctactgtaagcatagaccaccatatacctttcaaatggcatgtaacaagtgcaagatgtaacttcttttgtgtaatcatatatcaagacaggatccaaatgcttctgaggcatcttacccactaattcttttacaataacctcactatttttatctcttaccgaaatcgctgtgaattttttcaacaattcagcaatttcatcttgaacatcaaaacgttttaattctttgattcctgtatttccaaatgatgctgcataacttataattttttttgcccttgaatcttttccaaataactccatcgagcatcctacatccggatttgattggacacaattgaacacctcatcactacctattactaagacatctgtatcagggcgttctcttcgttcatcagacacaccaataatttgaagatatttaccagagtaattctgatagaactgtttatgttgatcaaaaggaatcttatatgcaaaacacttaattgcattcattaaccgaaatgccttatcctttatataggtatctttaccttgctctactttttgtggctgtattaaacagggttgtactctataatctgcaaaatcaacctgatgccctaatgtttcaattgttttttttagagcatatgcctgtagaaaagaaccatagttagcaattctctgcattgacattattgaaactttcattttcactctcctaattatatctgttatcgattcaaaaaaattctattgatttccaccactaataccggagctttctcaaacaatctataaaacagtttatgtccagccccaatatcagaagagtccaaatagtgttttatgtcttcatgatattgaaagagcagatcattttttacttgtttgtattcatctattctatttttatttttcagcacttctgaaaaagtactaatgtaagttttaaagtgtgaatttacagcacaatcaaatagatatttttcgccattattagaaaaaaaatcacaagcttctctcgtagcttccactattgacaaatttttcatattaaatgttgaagacattatgctattttctctctgtcgataaaaatagccaacataattcacatatactattctctccgcatagtacagtaatttataagttgtaaaagtatcttcatgtatttttcctacagggtacagaatctcattattcttaaacaaacttgttttgtataatttcccccacgcaacaaactccattccatgacaaattggatggtaaattttttcgatacactccttattactgaagatattacaaatgctttcttctctttccatccccatatcgtcatagacattgttatagtcacaaatacttacggaagccttaccgtcttctattgcttttacgagtgtttcaatgtagtggatgccgacataatcatctgaatcaataaatgtaatataagtgccattggcaatctgaattccagcgtttctagcatctgacagtccaccattctttttatgaatgacaactattctatcatctgttttctttaattcatcgcatatttcaggacaagcatctggtgatccatcatccactaatataatttcaatattcttataggtctgttgaagtaaactatcaacacattttcttaaatatttctccaccctatatataggaacaacgactgataccatatgttctcccctcccgacgcattttctatattaaaagcagttgagtatccaaattctttgaaaaaatttttatatcgaaattttcagctcgtcttattgcatttcttcttattttacaaagtgtttcttgatctttatacataaaaatttctgccaatgcatcgcaaagttcttggtttgaatatactaaaaatccacttatgttattttcaataatttcaggaattccacctcttcctgcacacacacacacaagtcctgccgccatagcttcaataattgttattccaaatccttcttcgtaagcaggcatatgcacaaaaatatcatgtttttccaaaatttctggaatatcgtctcttgtacctaaaaattgaactttttttgttagtcctaattttttcgtataatcctccaagttattacgatattctcccgctccaacaatatcaaaactccaattatcgcttttttctgaaagttttgataaagcaaacaatatattctgtacacccttctcttttacaagtcttccaacatataaaagtctaattggattatgcatttcgcagttataattgggtttaaatctgcttaaatctaccccgttgtatacaacgcaaattttattctcctgtaatccaaaacactctatcaggctagatcttacggcagatgaaattgcaattaccttatcactatttgcaaatgaatgaacaattatcttatctttaattgaaagctttccagatccagaaagcatatcttctgcttcacagtgtgcatatgctacaatcttcaaataagagttcttcagtttaagcccccaagcaaataaatacaaaatcggggaagcgtgatgaacaactatttcatctattgaatacagttttatttgtttattaagattcttccatactcctatcgctttttgggaactatagttaagctctataaccgtatgaccacttttcttcatttttactgcattcaccgaatctacgccctttaagaaagcaaacacattcttattgtttgaataattagcatagtctcgacacaaactctctattccaccagcttctcctttaacaagtaaatgtaacacattcatcgttactctcctttagcctcattgatacaaatacgctttaactcaatccaaatcaatccatgaccccattatattattccattcatcgggttttacttccgtaaaaccactgcaatgataaaatgttagttcaccaacataaatttgattattaatcaagtagaaatctactcgcaaatgaggacatccttttgacaatattccagcaagagatttcattttttcaaacatcacaggtttttctggtgcaacatctgcatttggatcacgcatccttatcggaagatgttcaaaattcatgttaaagaagtctgttctgggatcttcagatttgtcttttccaacatacactattttaggttgaccatcaaaacagaagaatttataatctgtaagacattcctctttttcttttggattcgaatcaaccatatatttttctgcaataattctcggttttactgctttatatggatactctcttcctaccaaaaagtagtttctttttagtgaagcttcaatttttttctttgccttggctttatctaatgttctcttatctttacaaataacaagacctccagaatcatgcgtacacttcaaaacaaactgatttggcaatttgtcaaagtcaatttcgtcaaaagtatcccaaacaccgagcgtagggataataaattcgtctccaattttttctgtgatccaattctttgcttcatatttgtctaccattttgctatattccgggttctgattatgcaactttagccattgaagtttttcattgaatgttactggattctctaaattaagtttttttcctgtatttgcccaatacatcaattttagatatttttcatcggttataaagccgagtttgcccttcattcctaatgaaaaaatgattttcttaggatccttgagtgcctctttaaaatccatatatttcacctcaatattactttccttctaatattcttataacactattcatgtgtttctctacagcataatcttcctcaactttatgtcttgcgtttattcctagcgtcatacttagtgtgggttcagctataaattttctcaatttatctgagaaatccttactgtttttcatttcaaacaacaagcctgttttgttatcttcaactatctcagccaaactgccaatcctagaagctaccacaggttttccataagcatatgcttcaataactgtgttcggcatgttttcataccatattgcaggacacacaatacacgtcgaatgagatatcaactcctgtaattcttttccatgtttaaatccagtaaaaactattttatcttctaggttattttctttgatataattccaaattttttgatcttcctcagaatcagatatttgacctgttattttcaaaacataatctgtatctttcaaatacttcatggcttcaattgcgtatataggtcccttttgatgtgccattcgacctagaaacagaaaatatttgtcatcttcatagcatggcgtaattgatgttgcgtcaataaatgtcggaacacaggtaactttatcttttgaaattccaccttcaatcaacttatttttactgaattcacatgtacaaatatattggtcaacatcatcaaatactttagtagctgcatacaacttcattgccattactctcaagagtgtacctgcttttgagccctttacacacctatgctcaattgcctttctataatctccgtgtaagcaggcttcgcatatttcattttcgcataagaaatcatattttggacaaaacataaaaaaatctgaaattctatgtacaacacgaactttttcttttcttgccgctcgaataatagaaggtgaaagatgatttacttcgtgtaatatgtataccgcatcaggcttagtatcacgaatcaaatgtctaagccttttttccgcatcatagttccatactgtagctcttaccattccaatcaaattactaatagattttttcgtgtccgcatacattatctgatttgaacgcggttttgcaaaatatttgctgtacggagtttcttcgttctggggattattaacagagaatggaatcacttcaattcccattttttctgccgcatccataaatttaaacatatatttttctggtccaccagctataaaatagcggtagtttgctataataatcctcatatttttctcccaacttattttataaacgcatcttcatactgtccgcagatcttatcccatgtgtactcttctgccacacgcttcttggctctccggcccatctctgcaatttcatctgtactcatctgatcagccttatcaatgagctttgcaaggctccccagcttgcggctccaataaagtgcacaatcttctgcgacttctttattaaaaccaacatcaaccagcaggttcagatctgtactaccaagagcttcaatcagggacggattcgtaccaccgaccgtatgtccgtggaaataagcataggcgttctctcgaatcttcttcagcaactcctgatcataaacagtgccaacaaatttgattctcttatcgctcttgaaatgaagtttttcttcaagctcacttaggaacttctcattcacatttgtgataatagcaaaatcctttttgctcttgcttttcatgaactctcgaatcataacttcaaaagagttctctggtacaaaacgaccgacgacaaggtagtagtcctttttcgtcagtcctttttctttataccagttcaccagcttctcatcgtcatcagctaatttactgagggtcagatctgcaccatacgcaataaatgtggtcttcggatttctgcccttgatgccttttccgtcatagcactcgtggatatacttctcgatattcactgagtcacagatagcaaggtcacagtatttaaccatcatctgttcagaaatcttccagtattttcgaatcggcgcagaccactttgctctcatccactcgtgtccgtctggattcaggtacacaataccacccagcttatggatttctttatagaagtgaccagcaaaaggtccgatacggcaagccatgatgtaaacgatcggatgtttaatccgatgttcctttatgtacttgcaacaagccttcaatgccgcaacatcataataaattgcctgtgcaggtccaatctgaggaatatctatcttgaaacaatgtgcattgtggaattcaaactcatgatcattgattatggtcacaccatccacttttgtttcgtccatgcagccgtcaccgttagctttacacgccacatgatatttaatatttttcttgttctggtggtactctgtgagcttataaacaaaagtctcgtatccgccataagcacccaagctcttagctcctaccagaaatacgtgttgtacttcgttttcccgctgcattcttcctacccctgtgttcttaaaatttaaaagtatctttcagtcccagccacttctgatccttatcgctcagattcagtgcagtgccatcttccagcatgtagccctctgcgctggcgctacccttatactcgcccttcagttcaggccattcaatgccgatctccgggtcgttccaagccatgccaccctcatcattcggatgccagaagtcatttaccttgtagcagaactctgcctcatcactcagaaccaagaagccgtgtgcaaagccctccgggatgagaaactgtttcttgttctcggccgacagggtaacaccgtaccacttgccataggtttcagaattgctcctgagatcaactgcaacatcaaacaccgtgccacgcacagcgcgcaccagcttgcactgcggatactgcttctggaagtgcagaccacgcagcacaccctttgtggacatagactggttatcctgtacgaagtggatgtcaatgccagcctccttcatatctttttcattgtaagtttccatgaaatagccacgggcatcaccatgaacagcaggctcaaccacacaaaggccctcgatgccacctacatttttctcaactttaatctgtcccatttcctctatctcctcttactgctcgatttctttcaagtaacggctcagcgcatcctgccaagtcggaagcggagtaaatccagcctccaccagcttactcttatccagacgactgttgaacggacgagcagccttgctcagaccatactccgccgtggtcaccggcaggatttctgtcttatatccagcctgaagatagatctctttcgtaaaatcgtaccagctgatgtagccaccctcgttggtggcatggtagtagccgtatttatcagtctcattcatatcgacaagcagtcgagccaaatcataagtataggtcggtgtgccgatctggtcattgaccacacggacagtatcgtgcgtcttgccgacattcagcatggtcttgataaagttcttaccattcagaccaaacacccacgcaatgcggacaataaaatacttttccagcgtctggctgactgccagctcaccttccagcttcgtctggccgtatacattcaacggcttgtaatccttgcagtccggctgccaaggctcagtgccctgaccgtcaaacacataatccgtgctgatataggtcattttgcagttcagcttcttgcagacatctgcaatgttctgcgtaccaccagcattgatggcacgaactttcgccactttatcgtcgtcctctgccatatccacagcagtccacgctgcacagtggatcacggcatccggatttacttctgtaattactttctcaacggcatctttatcagaaatatccagagccacatacggtgcttttgttaccgcagaacaatcagccacaccgctgtagttttcctgaatatcagagccaatgccttcatgaccgcgcttcagcagctcgttcatcacatcatgtcccagctgaccgccaacgcctgttacaaaaagcctcatgttctttcctcctcgttagcgattactgtacattttctcgtagtagttctgatactcgccactgatgatggtctcccaccactcacggttatcgagataccactggatagtcttcttgatgccgtcctcgaacttggtctccggcagccagcccagctcgttgtggattttagtcggatcgatggcgtaacgcatatcgtgacccttacgatcaccaacatgtgtgatcaggctctccggcttgcccagttctttgcagatgatcttcacgatctcgatattctgcttctcgttatggccgccgacattatagacttcaccaacgcgacccttgtggataatcaggtcgatagctttgcagtggtcttctacatacagccagtcacggacatttaagccttcgccgtaaacaggcagcggcttgtcagccagtgcgttagcaatcatcagcggaatcagcttctccgggaaatgatacggaccatagttgttggagcaacgggaaatggtcacaggcaaaccgtaagtgcggtggtaagccagcaccagcaggtcagcagcagccttagagctactgtacggagagctggtgtggatcggagtctcctcagtgaagaacaggtcaggacgatccagcggcaggtcaccgtaaacctcatcggtagaaacctgatggtaacgctgaatgccatatttgcggcaagcatccatcagcacactggtaccgatgatattggtctggaggaagatgcccggatcttcgatggagcggtcaacatgagattctgccgcaaagttgaccacgatgtctggatgctcttcctcaaacagcttatccacagcttcgcggtcacagatgtcggccttcacaaagcggaaattcgggttgtccataacaggtgccagtgtagacaggttgcctgcataggtcagcttgtccagacagatgatccggtaatccggatacttcttcagcatatgaaacacaaagttactaccaataaaaccagcaccgccggtaacaataatattcatgatttaaattctcctcttcactttcccttattaatacagatgctcctgatacttgccgtccatgacatccttcagatactgtccatactggttcttcttcatgacctcatagacttccatcagctcatccttgctgatccatccgttcaggtatgcaatttcttccaggcaggcaatcttacgatgctgatgctgctcgacagtctttacgaagttggtggcatccaccaggctctcatgtgtacctgtatccagccaagtgaagccctgacccagcaattccacattcagggtaccatcttccagatagatgcgattcaaatcggtaatctccagttcaccacgagcagacggcttcaaattctttgcaaactcgaccacacggttatcataaaagtacaagccagtcacgcagtagttgctcttcggatgttctggcttttcctcgatagaaatggccttacctttcttatcgaactccacaatgccgaaacgctctgggtcatccacatagtagccaaacacagttgcaccccttccgctctcggcgttttccactgcggcagtcaatcttttctttaatccgtggcccgcaaagatgttgtcacccagcaccatagccacagaatcattgccaataaaatcggcgccaatgataaaggcctgtgccagtccatccggagaaggctgaacagcataggtcaggttcacaccaaactggtgtccatcacccagcaaattctcaaagcgaggagtatcctgcggtgtggaaataatcaaaatgtcacggatgcctgcattcatcagaacagacatcggataataaatcatcggtttatcaaaaatgggtaggagctgcttgctcgtaactttcgttaatggatacagacgagtgcccgatccacctgctaaaataatgcctttcattctgtatccctcgtctttcttaatctctctggaaaatatctctcgtgtaaactttctcttttacatcatccaagcacttatcatagcggttagcgatgatggcctgactctttttcttgaactcatccaaatcattaaccactactgatccgaagaacttctcgccatttttcagagtcggctcgtaaatgatgacagtcgcgcctttggctttgatacgcttcatgacaccctgaatggagctctggcggaagttgtcactattgctcttcatagtcaggcggtaaacaccaacaacgacttccttctccttgctctcatcccagctgtcgtttgcttcgtatgcaccagcaatctccagaacacggtcggcgatgaagtctttacgagttctattgctctcaacaatagcctcaatcaggttctccggcacatcggcgtagttggccagcaactgcttggtgtctttcggcaagcagtatccgccgtagccgaaggacgggttattgtagtgagtaccgatacgaggatcaaggcaaacaccgttgatgatctgctgggtattcagccccttcatctccgcataagtatcaagctcattgaagtagctgacacgcagagccagataggtgttggcgaacagcttaacggcctccgcctcagtgaaacccataaacagagtgtcaatgttctctttaattgcgccttcctgcaggagttctgcaaaagtgtgtgccgctttcaccaaacgagcattatccacatcagtaccgacgatgatacgagaaggataaaggttgtcgtacagagccttgctctcacgcagaaactccgggctgaaaatgatgttgtcgcagtggaatttctcacgaacacttgcagtgtaaccaacaggaatcgtactcttgataaccataatggcttccggattgtactcaatgaccagcttgatgactgcttccacagcactggtgtcaaagaaattcttcttgctatcgtaatttgtcggtgcagcgattactacaaaatcagcatcagagtatgcttccttggcatccagagttgcggtcaaatccagctctttctctgccagatacttttcgatatattcatcctgaataggagacttcttgttgttaatcagctccactttctcaggaacgatatctaccgcagtcaccttgtggtgctgagataacagcgtagcaatggaaagacccacgtaaccagtaccagccacagcaatttttaaatctttaaactctctcatttctctatccctctaattcttttatttataaaactcagcgtaccactcagcgaagtttctcagaccagttctcaggctggtgctcggcttgtatccgaagtcacgctccagcgcactcgtgtctgcataggtcacaggcacatcacccggctgcatcggaaccagctccttgtgagcctcgaagtcgtaatcttccggcagaacctttgcacgaaccagctcctcgctcagaatctgcacgaagtccagcagattctccgggttctgattgccaatgttgtaaacggcatacggcggaatcggcagaccatcctcgccattcttcttgtctggtgccttcttcatcacacggacaacaccctcaacgatgtcatccacataagtaaagtcacgcttgcagttgccatagttgaagatcttgatggtttcgcccttcaccagcttgttggtgaagccgaagtaagccatgtcaggacgacccgcaggaccataaacggtgaagaagcgcagaccagtggaaggaatgttgtagagcttggagtaggcatgtgccatcagctcattggatttcttggtagctgcataaagggaaaccggattgtcaaccttatcatccgtgctgtacggaaccttcttgttggaaccatagacggaggaggaagaagcataaaccaaatgctccagactctcgcaatgacggcaggcttcgaggatattgaaaaagccgaccaagttagattccacataagcatccgggttggtgatggagtaacgcacaccagcctgtgctgcaaggttgacgaccacagacggcttgtacttctcgaacagctccgtgatcagttccttatcagcgatgttgcctttgacgaaggtaaatgtgggatacttggccagctcattcaggcggaactctttcagcgccacatcatagtaggcattcatattgtcgatgccgataaccgtagcagaaggagcttcctgatagattcgtttcacaagattagagcctatgaagcctgctgctcctgtgactaaaatcgttttattatctaaagtaactgtgctcatatgtattcctccatttttgttaacttcctaatctatgtacacatctgctcttcacagatagtatttctctctaatttccgctgtgtgttcatcacacggctaagtgttttcttatgctgtcgtatccaattaccccaacaatcaatatttcccttgttttctacttcataaaacatccgttgagtacactcgtctctattcctctatatccgaagtgttgatttatacagtcgaaccccgtataccctgcaatgatgttttttctaagtgttgggttattgaatcgaaccctgtcggtgcatgagttttgttaaaactgtacatatcatccagtccaattctcgccattcattgtttgttatgaacaattcattccctctctccgcacaaaacatgtaattatcatcaccatccatgctctactcaacagctgttttatgaagtagaaatcatctatttttctttaattttcatgactcaacaaaccgttatgatgttggtgtcattagcgggtcagatagtgtactcaacagcagtttcagacattaatgataaactcatggatttttgttgttttctcctgttttccgccttttcctcataacttctgaaaaagatgtgccaattttgtgccacaggggtaaaaaatcagcgttttgcataaacaagcggcatttttagttcatatagatgtggaatacaaccaatttcagcaccccatatagtgtgcaaaacaggttcttttcgactatgctacgtcaatacggtttgttgagtagacatttctgcgctctacacacttaaaagaagtagccttttcagcatttcgtatgctttttattgaccttttacaacaatcctacttcagcaaactgcgttggctgcacattaactaccgcagcaatcatatttccaccatttccggctcattttcaacttcataaaacgtcctttgagtcctcctacactgacccttccctcttcagaaccgtcatcactgtcttaaacaaaatctttatatccaatccaaaattccagttgctgatatattctgtatccagtcgcacgacttcttcaaaatctgtgatatcacttcgaccgcttacctgccacataccggtaattcctggtttgatggcgattctggctctatgatgcagttcatatttcagtaattcatcctgtaatatcggtctggtacctaccagactcatggttccatttaatacattccagaactgtgggaattcatcgagggatgtttttctgataaattctcctattcctgtttttctgcttccgtccggaaggattttgtttccaatcacacgtgggtcaaagtcaagcttgaacatacgcccgtcgctcattttattctgtgccataagttctgctttgcgttcttcggcatccatgtacatgcttcgaaatttatacatcttaaatggttttccattctgaccaattcgtgtctgtgaaaagaagatcggacctggtgaactgatgtaaatagccggtgctacaaaaataaaaataattcctgtaaggaaacatcctacaagtcctcccagaatatccagtgctcttttggcaaatgcctgtctgtctgtagcatagttcatagtggttgtcagaaccgtatatccgcctactgtttctacaaactgtttctgtcccgaagtacttttcacttttgccagatttacatgaactaccattcccatctccagcaattcctgtatcagttcatccggatatgagtaagattcatctatatttacaaagacttcgtctacccattgctggcagatataggatgctgcattctccagttctgctactacaggaattcctgaaatcttcctgccgactgcatttttatcaacgattatcagaccattgatgttatatcgattgtaattgtgttcttttacattccggattacttttgctgcctgatcatagttcgttacaatgtataacgaatgctctccaccttctgccattttatggatcagatgtttcttccatgctattcttgtgccataggaaaggaatacataaaatactcccattagatacagaacagttcttgagaaactatgtccatcactgacagtgaacagatacagaccacttgccagttccagcagaatcatctgccggataacagaatgtaattcctgataatgcccccttctcagaactcctttgtaagattcaaaaataatgattagaaataaatccgccaatattacgaagcttatcatattgcggtaaattcccgctctgaacagactctgaacagaaccatttcgaatcagatgtgcaattagtaaggacaagaataagcatattaaatctataagtatgaaatccttgtgtttataccatcctcttgactttttcctatacatacgctcttcctcatcttctccttcttttttctttttttaaagcatcttcaatctggtctgatatcttcggacaaaccaaataagccgcagtcttttatgttccggcttttttattctttatttatatttgtcatatttctctttctcatcttcatatttgtgcatcacccttttgaaataatttccagacctgtgcgcagttcctgctgtccatctcccgccgggagtaccagccacgcaaggcgtttatgtctgtcaattctgcggataaatttctctcttccctgaaggggtccctgtgtcacatgggttgtgccgtctttgatgtagcctgttgacattgagattgtctttgtatccggctgcatcagtgctttcaggaattcttcctgttccggacgtaagggtgttatgccggacatgacagcttctgccagagagtctgagcagtgctgtctgctcagtgtggttttcagttcctctttgttcctgcattctatgaagaagcagtctgtaaacagtggtttctgctctacatgccaggaaccctggtatcttttcatgcagtcataggtggggatgaaaatttttttcttatcctgttctgacaattgggtgtcgtaaaatttcttaaagtctgcgataatatttcccgtacattcgtacacgaataacatggcggaggtcacctcatttcctaactgaagccgcagagtatcacactaagggagtcagtttctttcggattcgataattttcaactacggataattttacataatgtgacacatcttgtcaatatttataaagcaatctgctaaattctatgctgttttaccaaagcatatttatattatcattagtttttatgaaatttttaatgaggttcatcctttaattcgccatatggagctaaatggcttagctcattcaccgtaaataaaaccgtcacgcggaaattgaaaggagaaccactaattatgccacgaaaaggtgaaaacatttacaaacgcaaagatggacgatgggaaggaagatacatcaaagcacggtcaaagaccggaaaagctgtttacggatatgtatatgcccccacctataaggaagcaaaaagaaagcgcagtcaagctattattaatatagaagcgaaccagactactatctgcaaagttcccgaaactacaatgccaacatgttttatcagaaaactggcaaatgactggatgaattccatacagtctcaaatcaaaaagtcttcttatgttaaatactacaatatacttcatacttatattcttccggaatttgataatgttccattaagtgaactcacttcatcccgaattcaaaagttctgtgatgaccttcttacccatggcagttcatccggagaaggactttcaccaaaaacagttctggatattctgtctctgatgagaagtctgctcagatatgcccagattcagggatatcagccgccaagtaccggaaaggagatcatcatccgccagactgcgccggatacagtagtaattccgcgttcctctcaggacattctctgccgatatctttatgccaatatgtcagaacgcaatcttgggattctgctgtgtctttttacgggaatgcgggttggtgaaatctgtgcgctgaaatgggaagatttttcatttcaggaaaaatctatctatgtccacaacacaatgcagcggctgcaaattccagattccaccaccgcacagaaaacccgtattatggttacatcgcccaaaagcaaatgttctatccgtacaattccaattccagacagtctgatccagctcattcaaaaggaatttcccaaccgtcagggatatgttcttgccgctgtaaatgaaaaatatattgaaccccgcactatgcagaaatatttccattatgtacagaaacagtgtggcctggttcctgtgaatttccatgcactgagacatacatttgccacacgctgtattgaactcggctttgatgtcaagagcctgagtgaaattcttggacacgctactgtaaatattaccctgaaccggtatgtgcatccctccatggaactaaagcagcaaaacatgcaaaagctctcctgcctgttaacagtcatataatctggtcaaaaaccccgaagctcctgataactacaggagtttcggggttttgtaccacttagtgtgataatctacgatttcaagaagaacattctgggcttttccgatgtaaaaaataaaggaatacgtctatgattattattccctgtttgtattgatttattcgtattttttagaacttattgttcttattttaacagattttttgttctttttcaaggtttttgttctgaaaatggacaaaaaaataccctgtcagtttgaaaccggcagggttaatactatccttctcctgacatactggcttttctttcctatctgtgtcagatagcccgtcgtaaacaaagcactccacatattgccttcccatcagaccacaatatacaatacgaaaaacatacgaagcaattgacatacgtataaatacgtattgcaatataagtatgataaggaaaggagatataaaagatgccaatgttgcgatacttaattgttttttccatagtagccttcatggctatactctgaccacttcaagtacatttcctgatagttctgtttgataaactcctgtatctttctgatttctctatcattgagaataccacgattctgcagcacagtatcgccgttgtcttttacaaaaaactttgccgaacctgcctcggttaatttacggtcactcgcatgaacgtgcatacactcaatcacacagtaagatgtgaagtacaaatagtatcctgcaattttatattcataatacttcggcatcttaatcctccataaacttacggttcttctccagataatctccagcaatacgcacttcaatgtcatccatgcttgtttcaagtaccttaccatcttttgaaaacactgccgcacgatctgggcgattcagattcaacacgcgatagccctctgtgcatcgtgtgaacgcatagccgttcacaatcatgtccgccgcatccgcaacctgtttaatatcagccatttgcaaccttcactccttttattggttctagaaatttatcagcatcaaaataaagattttgaagaatcggtacaagatcaatgtattcttcttccggttcagcattctgcttatacttcgccatcactaccaagtagccgttatcccactctttcacttccgtgtaatgctccaaagaatacggtgcagcaaagcgaatcacatgattaccaaaacgaaatactgtataatttttctcattgctaagagtagcttcaccagtcatgctgaatcctccttaaaaagtctgtccaccatttcatggatttcattcactgtttctatatctgatttcattgaacatggacacgaaacctgccgggagagttcgctgattcctttcatgagaagagaaaatctctttactgtaacgttttgaatatcaatatcaccggcttccaatttctgaacccagcgaagatccagccctgctgcatcagcaagagctttttgggtaattcccagtccttgtctccactcttttatcttaaccatgtcaactcctcctgtgccaattatacgtcaatattggcgcagagtcaacacaattttctttgcttagatcctatatttataaaccggattacattgataatactattgatttgaattccaatgcagccaaagaacttgactggatgagtttttgggaacaattatttgtaaaatctgtcaatttctcattagattcttttgcccatttaaatgaagaattaaaaaaggaacaaaactctgaaaaaaagacacttcccatgaatttggaagaagatgctcttaccgcttctgaagagaaatccatgattcagtcaggttatctgacacgcgatggagaaaaattatatttaccggaaattatacgtcacgcacttggatttcgatacgaaagaggagcacgacctcgtgtactgtcgttacttcttaaacattaacagtatacttttctccaattatcaccgaaaggctccttacggagcctttcaaaatcaacaaatccacttttctgcagttttagcaatctcatcttctacttcctctgccatttctttattctcagcactgacagaaatataaattttcagcttaggttcggtaccagaaggacgtaccaccagagagcagttgtcttccagcaggaattttaacacatcagacttgggcaatccatccagtccctgtacataatccaacagcctgacaaccttctttccgccaaactccttaatgccaccgcggaatgcctgcatgatgctctgcatcctggcaaaacctgcgctgccatcgaactcatagctgtgcagggtgttcaggcagtaaccatatgtcttatacagttcatccagcttgtccaacaggctgatgccccgggtggcatagtagctgaacatctcacagatcatatacgcaccatccacgccgtccttgtcgcggacgtaagagccggtcagataaccatagctttcttcgaagccgaacacataactgtctgctttccccagctgttccagcttgccaatctgctcgccgatgaacttaaagccggtcaacacgttgacggtacgcagtccgtaatgggcggcaatctgctcgcccatatccatcgtcacgatggtcttgatcatgaccgggtcggcaggcatcttaccgtgcttgatgcgctgactgcaaatgtaatccagcaacagcatacctgtctggttgccggtcagcagctcatactccccagccttattcttgacggcaatacccacacggtcacaatccgggtcagttgccaacaacaagtcagcgttgcacttcctggcatactccatgcccagtgccattgcttccttgatctcaggattcgggtaaggacaggtcggaaagtgtccgtctggctgctcctgctccttgaccacagtaatgttagtgtaacccatctcctggagggtgcgggtcactggcttcaaccccgtaccattcagcgggctgtacacgatggctacattcttgttgacgttctcgccaaacaagactgactgactcttgacctgctctacaaatgcagtgtaaacctcgtccggaatataccggatgctgccgtttgccacgccagcttcaaaatcactggtcttgacatccgcaaagatgtcaagtttttcaatctcggcaagaatctccgccgctgcttcggtcgtgatctgacagccgtcagcaccatagaccttgtaaccattgtatttgccgggattgtgggaagctgtcaccatgacacctgcagaagtatgcagatagcgagtcgcaaaagatacggtcggcaccggcatcaggacaggccagatattgacactgacaccatttgctgtaaacacccctgctgcgacttttgcaaacacatcgctcttgatacggctgtcgtagccgattgcaacagaaggttctttaaagtgtttcttcaaatagtctgctaatccctgagaagcctttgcaactgtgtaaatgttcatacggtttgttcctgcaccgatcacaccgcgcagaccgcctgttccaaatgccagatcacgataaaacgcatcttcgacttccacatagtccattgccttcagttccgcagcaacatccgtatctgccactgcatttgccagccatctttcatattccttcttaatcttcatcttacctacctgtctttccccataccctggagttctgtattttatcctctgatatcaaggaactgcgcctgtccgtgaatcgtaaggacttctgaatccgccggcacaaacacacagtctcccttataaaaattaacagttccctcatcataggatatcgtgccacagccatccatgcacagtaatacccgaaatgccatcctgtccgcacggtaatgcaccgtctgtcggcgttctgtattgataagcatccggtatacttcaaaatatttgcagcgtatcaacagttccgatgccatccccggacggtacttcagaacccgcagcggctgtctcggctctgtactgccgtaaagatctgccacatccaacgccttgtcgatatgcagttcccttttcttcccgtcctttcctatgcggtcgtaatcatacaaccgataggtcaggtttgagctttcctggatttctgccacgagtgcacctgccccaatggcatggatcgtgcctgcagggataaaaaacaggtcatccttgtgaataggtaccttctgcagatacttcatcaccgtaccttctgccagtgccttttgcatttctttctttgtgcagtcctgccgcaaaccgtagatcagttttgcatccctggctgcatccagcacataccacatctccgtttttccaagctgaccatgttccttcatctttgcatagtcatcatccggatgcacctgcacagacagatcctttcttgcatcgatcagcttcactaggattggcagcgttgtttcgcccttatgccgttctcccagatactccgggtgggcttttatgaccgcagtcagctccattttgtcaaacgttccacaacacacagtacttaccccatccggatgcgtggaacattcccatgtttctgccaacggagacaactcaatattcttcccatattcatcgttcagcctttttccaccccacaggtaatccttacctgccggacggagcaaaaggggttcatttcttttttccatgcatacgtccattgatcaccatttctgtctttcttaccagtcgtattttctatcttgtttactgctccagctcaaacttctgcttatcgtggacgttgatatccgcacccagctgtacctcaatcagcttcagttccgtatcagctatcacagtatgacggcagcctgcggacatagttataacgtcacctggctttaccatctgctccataccatccacgatggtttttccttcaccggatatgactacccacacctcatcccggttcttgtggctgtggtaattcatactgtggccgggatttaaggttaccttaatcgtcagggatgtggtttccacatcgaccaccttaaagcttccccaggacttctcggcaaacataatctgctgttcaaacttatctacaaacggcttaatgtaagaactctgctctttatccgagaccagaatgccttccggtgatgcggagatcaccacatcatgcaaacccattgccagcaccggcacatccatttcattgatgatatggactccggagcacttgtcgttcaactctcccttaccaataatactttcgtccattgcctcagtcagcgtattccatgtgccaaggtctttccacataccggcaaaacggacaacctgaatcttcggctcatgctctgccacagcatagtcgaaagagatcttcttcatggtatcgtacttgtcgaacaaatcctgatagtctgtaaaatccatcaactcatgggctttatccatcacataacccagtttataagcaaacacaccaccattccagagtgctccctgtgcaatatactgttctgccacgtccgctgtcggtttctccctgaaggtccttacctcagctacatggtctgtactctctgggatgatataaccgtatttctcactgggataagtcggttcaatgcccatcagcaccagatttgcctcgcacttgtctgcctgctctgacagttccttcagtgcttcaaagtaatcatcttccacataggggtcaaccgggcagactaccacagactcagacggggcaacgtgcatcacatccaccagataagctgttgccagcgcaatggccgggaatgtatcacgacggcacggctctacgctgatgcccacatcctcacccaactggttatgaatcgcagaaacctgtgtcttaccggtagcaatggtcacggtcgcatctgtgtccaccttcttgatctggcggtagacacgctgcaccatggactcataggtgccgtcctcctttttgaaaatcttgataaactgtttggaacggatgtcattggaaaggggccacagacgcttgccggaaccgccggacaacaaaatgatattcataatcttctcctcgtaaaaataagatcagcgttcagcgcgcatgggattattcagaaagtcctcatacgcaaggcgtatgccatcctcaagctcggttttatacgtccagccaaggttcgttgccttggaaacatccagaagcttacgcggtgtaccatttggcttatcaggatcccatttgatctcaccgttatagcctacaaccttcgcaaccagctcagtcagctccttaatagtcagttccttgccggtaccagcattgacagtctcgttacctgagtagttgttcatcaggaacacacacagatttgccaggtcatccacatacagaaactcacgcagcggagaaccatccccccagcaggttacacttgcagcatcgctctccttcgcctcatggaaacggcggatcagcgccggaagcacatgactgtgtgtaggatgatagttgtcatttggaccgtacagatttgtcggcattacggaaatatagtctgtgccatactggcggttcagaaactcacagtactttaacccggaaatctttgccagtgcatatgcctcattggttttctccagttcagaagtcagcaggcagctttccttcatcggctggggtgccatacgcggataaatacaggaagaacctaagaattccagcttcctgcagccgttcttccatgcagagtgaatcacattcatttccaaaatcatattatcatacatgaaatcagccagtgcattctggtttgccacaatgccgcctactttggcagctgcgagaaacacatactccggcttttctgcagcgaaaaacttctccactgcatcctgacgggtcagatccagctccttatgggtacgtgtcacaatattcgtatatccctgacgctgcagctcacggacaatggcagagcctaccattccgcgatgacctgcaacataaatttttgcatttttttccatcataatcgtatgccttctttcttacataacagccttcatggccttctcgcgctttgcaagctcacggtcattctttgccataatctccaccagttcttcatagctcgtcttctgcggattccatcccaaaaccgtcttcgccttagtcggatcgccccacagattgtccacatcagtcggccggaaccactggggatttacgcataccaacatcttgccggtagctgcatcgtaacccttctcatcaatgccggtaccttcccagcggatggtcataccgttagctgcaaacgccttctcagtgaagtcgcggaccgtgtgctgtacacctgtcgcaatgacaaaatcctctggcttctcctgctgcatgatcagccacatgcactcaacataatctttggcatagccccagtcacgcagggaatccatattgcccagttccagatgatcctgcagaccttctgcaatgcgtcctgcagccagtgtgatcttacgggtaacaaaattttcaccacgacgctcagactcatgattgaacagaatgccgttaacagcgaacattccataagcatcacggtattccttcaccatccagaagccatactgctttgccacagcgtaaggggaatatggatgaaacggtgtggtttctttctgtggaacctcttctaccttgccatacagttcagaagtagatgcctgatataccttacaggtctttgtcagaccacagacacggacagcttccagcacacgcaggacacccagtgcatccacatcaccggaatattccggcgcatcaaatgatacctgcacatggctctgggcagccagattataaatttcatccggtctgatctctcccaccagacggatcagccctgaagaatcagacagatctccgtcatgaagtttaatcacatttttttcgatcagatgatcgatacgggcagtatttgaaatggaagcacgacgtacaataccgtgaacctcgtaacctttctccagtaaaaattcagccagataggaaccatcctgaccggtaataccggtaatcaatgcaaccttagacatatattaacctcaactttccttttgatttactttctgttgatcaatagcaactgttcaatacctccacagttactgcatttattttagtaaaaaatccggaaagcctgaattcacgatattgccctttctccctgttttcttacattatcttgctcttttttctcacttctcccacttctctctgtactctaaaggactcatgccttccatatgtctgaaaacccggctgaaataatgaggctcccccagaccgcatttatagccgatgatctttatcttttcgtcggaaaagcggagcatatattttgccttcgtgactctcctgttcatcaggtagctgctgatactgacaccaaactgctccctgaacacgcgggtcagatagtatttactgataaaaaaatgctctgccagaaaatccaggcttattttctcctgataatgctcatccaggtactgctttacaggaagtacattctgttttttcagatctgcatccctgtgtttttctcccgggtgccaggactcattcatcagaagcgtcagcagataattcagctcactgttgatcttcatatcccgaatgtaatcatcggaatctgccagctcataaatcctgtgacagatttccagaaacccggaaacagaaacggggtggaagactgctcttccaccccgctctaaatacttgtcataaattgctgtcatattcggcccatagaaatgtatccaggataaactccacaacttctccgaactactgtgtgcatactgtttcctgcagtcaataaacacacagtctcctgtacgaagagaataagttctgccttcacagatgagctcaccctcgccatctgtcactgtaaaaaacaaataagaggacaggttactgcgccctgtgctgtgaggcttatgtacctgcagagagccaatctcctgcagatacagtaaagaagtcctggcaaaatttgacggtgtatataaaatcctgtcagaggtgacaaccggtaattgtgtattaacaaataaatctttcatctgatcttttccttcggaatttctattcccatacaagcttacagtcagctacgccaacaaggctgtccataaatacttctttcagacgttcttctaccatctgccttgtcacaccctttttcagaatcacctgaaggaaaccgccgccaccggcaccacataccagctttccgtccaccagctcctcaatactgctgaaaatctgctcaatcaaagtgttactgcttccggcatctattttcttactcagttcccagtgataatccagaagctttgcaaaaccgtctacgtttccacgctccagttcaaagcgcatcagtgctgctgttttctggatctcctccaacgcaaacagactgtccggttcattgcccacatagcgccccaccacatcacggagaagatttctcgccagacgcctctgccctgtatagatcaggacaaatctctcatccagttccttctttgtctgcggtgaaagctctatgtgtgctacctgaagctgctgttgaagcccaggcatggaggtaatatatttaagaccagatgtaatacctccgacctgatcctgccatccgcctcctgtagacatgatctgctccattgccagtacatgggcatataaatcttcttctgtatatgcgattcccataaattcaaacactgccttcacacaggctgccgaaagaatagatgaggtgccaagaccggaacctttgggaacatttgttacctcagaatgcataacaaaaccactgccaagacgttccagtatttcacccagagtatgtccttccctgggaatgatcccacaggcaagaagacaagccttctgcagggcaaaaggatcataagggtcacctgtcgcctgcaaaggctcaatcgtgtcaaactctccatgaacatccatatcccggctgtcaaaaaccaccttctgctcaggaatcctctccaatgtcacctctaccggcttctccccgttcagaagaatagctgcatttaatacagtcccgcccttttcattacaatagggcggcgtatcactccagccacctccccagttcacacgaagcggcagcctgactgtatgatgatctgtaacaatccttgcctgctcattataagcaaggcttttgatcgtcgcttccagaacttccgactgaataatgcggaaacattcctgcacctcattctcatcctcaaggatcactcccagataataatgcagacgcattttttcaccgaaatctgcttttctcagacgcttctccagccattccttctgaatctttgtcaaagactgcagctttcttatacttcctgccggaacctgatctctgattgcctttgcaatcccgtccatagttaccagatctgccatccgcttattccatgctatgatagcatccggatccgcctcattaaatccggcgcagagagacttgtgggaagctgcagtccataaagatctgtcaaaatctttccctcctgtgacaatctcataaagttccagtgccgcatctgttgcctcccggatcgtatctgcctcctgatacagcgcagcagaccacaaggtatgtgcctgtccgttctcctcccagaatctcactccaagtgtatcttccagttcatccagatccctgccaaacagtcggttctccttaggattatcatttacgccaaaaatacggacaataaattttccgtttctctgcttcagcccatggagaacaacattatcaggaataacctgatcctgcacatctatgtaagagagcacactgtggctgccaatcctggaatttccatgcacataagaaacctccagataacagtccttcccaacagatgccctgctgctcagtacactgttatagccggacacatcactgcggatactgctgcccactttccggctccatcccagataatggtactcatccacacctccgttcatcaactccagtatctccctggtcgttccaaaatgaataaacttcgcaggtgccagacgcagaagcttcatcctgtagggacgcagcacctcccacacacgggttctggcagccgtcagttccggacagaattcaccctccggcttctccctgtaaaaatcctccagcgtagaatccgaagccagaggataaagaaaatcagcgtaaagagaaagacgcgttctctcattgacatttctgtcatagtccgcgtctgtttcaatcagtgaatataaagatttcataatgtcagtactaaagatcagtgccccggtatcaatatccacacaaccggattcattgactgctcctgcttcccgcaggacctccacagatttcttctgcagacagcacttcacatttccgtccggtccattcagataaacaccatggttcttgccggtctctacgttttccttaaaggatatggcagctgcacccacattgttgtagtcaatctgaagaggattaaataaaagcagtacatctcccgacagcagcaccatcccttcacggatccgcgaaggaacagaactcatgcatatcatgaattcatcaaataaagtggaactacgtccattgggtaattcatgaggcaccggcgaaaaaagcttacccagcgcagaatactgaggaacacgcttactgtccccgcctgaatgaatcaccagcacacgaaggctgtcaaaagatccttcctgttcatgaagatatctcagaacctccagcgtagccccgccggatccgacacgcctgccatcacggtccgggatggcaataaacttcgtgcctctcggcaggaaattctgcctgtccgcaatctgtttacggaaaccttctgcctgctgctcattggaagcagtcaggatcacgtagtcccaacgtgggaagctacggagttttaaagatctgttataatcgtcccagcagtccttgtaggcctgggacaggaaaagggaatttagatttgtcatttgggagtcctccttgggtatagatttttcacaagtcaaggctgttttctatcaaacgaaatgatgccttgccagctgcttatggaaatgataatgaggcaatattcagtgtaaaagtggatcaaaagagagcgtaaatcaagatatttcatagtgtctgccccatgtataaccaaacataccgtttaacctctcccagtacaccatgaagtttttttcttttacagacctttcttgatttttattattccccagtagcacatacctccaagcactccaccaactgtgttatagaagatgtctgataattggaatgtgccgagccgtaatagcagttgcaatatctctatcatcaaagaaaaaacaaacgctatcttcccacttggccacaatatattattccaaccattgcctgctttgccatgaaatgtccacatcactactgcagaaaacggaaccatcataatcacattctcaatgcactccgtggtaagttgctgctctccatttacgatctcccagatgccccagccacccataacattagacaacgggttcatccacaggtttcgattcaataatgtccggaacagaataagggaagttacaaaggctaagaaaaacaattttctgaagaatatactctctttgaactccctgtaccatgtcaccatagcattcttccagccttttcctgcttcgataggtttataagcatatagatagaaaaacatagcaaggaatgaaagcagaagtgaaaaaccaaacggctcgtagagagcagtcaggatgttagtgaagatctttccgagtaaatcaattgtttctttcatcattttttacagatcactgaacaggtcagctttgtacacaccattctcctgcatcttcctgaagctgtctttcacagatgcgacatcttcgtgataggtcataccgtaccaggtatcgttggttttcagaaccttcactgacatctttccctgctccaacaactcaccgatgaagacaggaatcagatactcagcctttagtggattgctcggtacttctttatcgaagaactccttaaatcctttctccagcacatccaggaatcccggtgtcagcccccacatgttcatagaaaccagagaattcacatcaacagacactccgtctgcttctgcgccatctgcagtcttcacgatattcttagtttctacaatctcagtcaagtttccattctcatccatcttgcagataccacgagtcacaccgccgttatcagacagagtgttactcagcacaaagcctgccatgcaggacttgccaccattcatcagatactcatgaacagccttgaatccttccctgccatagtaatcgtccgcattgatcacaataaagggagtcttgataaccttctttgcagcaagtacagcctgtccggttccccacggctttgtacgatcttccggtaaagttcccggaatatccttaatatcctggaaaacatagtctacagttacatcatgagcggagcagacagaagcaatacgatcaccaatgacctctttaaactccttctcaatatccttacggatgataaatactacatggttgaatccagcctcaatcgcatcatggattgagtagtccatgatgatatggtcagtatcatcgaccggttccaattgctttattcctgttccaaatcggctgccgattccggccgccatgataagtaatgttgttgttttcataatctctccttactgtgcttacattgctttaactaggtatcccttaacacatacagattcgtatatttgtcttatgattatttgttccgaccagctatattcataggttccgactcaagcacccactaaaaattcatattatactttctttaggaagcttttaggatatgttcactcattttatcagtatttcatagtatctgacaccgcatgccctcagtctccctcgctcagctgataggtctgcccctcgccagacaagacaacgaaacacaggaaagacaccagatccgatctctgggatatatgtggatgaacagcctgcaaagagccgacctcctgcagatggagcaaggatgtccgggcaaaggttgatggggtgtaaatgattcgggaggagcttacgtaagaagattgtggattaaatagttcttgatctataagctgctcctttccaatatcactttttccttcgcttatatccaactggtggaacggcatcctttggaatatgccacggtgattcttttccatcttgattgcagtttggaattttaccttccctgcaccactttgataccgtggccggagtaacgccaaatttctctgcaaattcccgtgttcctattgcctcactcatttatataatattccttttattatgatatctgcttctacatcttagccgcttatcctttgataaacatcacctactgctcaccagtcgcagtgtgcatttctgagcagctaccgtacgatttctcacacagccttctaatcagaatttaaaagtatctttcaatccaagccacttctgatccttatcactcagattcagcgcagtaccatctttcagcgtgtagccttctgcacttgcgcttcccttgtactcacccttcagttccggccattcaataccaatctccgggtcgttccaagccataccaccttcatcgttcggatgccagaagtcattaaccttatagcagaactctgcttcatcgctcagaacaaggaaaccgtgtgcaaatccctccggaatgaggaactgcttcttattctcagcagacaaagtcacaccataccacttaccataagtttcggaattgcttctaagatcaacagcgacatcaaacacagttccgcgcacagcgcgtaccagcttgcactgcggatactgcttctggaaatgcaaaccgcgcagcacgcccttcgtggacatggactgattatcctgtacaaaatgaatgtcgatgccagcttccttcatgtctttttcgttgtaggtttccataaaatagccacgggcatcaccatgaacagcaggctcaatcacgcaaagcccctcaatgccacctacatttttctcaactttaatctgtcccatttcttctatctcctctattactgctcaatttctttcaggtaacggctcagtgcatcctgccaagtcggaagcggagtaaaaccagcttccaccagcttgctcttatccaggcggctgttaaatgggcgagctgctttactcagaccgtactcttccgtacttaccggaagcactgctgtcttatagccagcctgatgataaatttctttcgtgaaatcataccagctgatatagccgccctcgttggttgcatgataataaccatatttttcggtttcattcatatcaacgagcagtcgagccaaatcgtatgtataggtcggtgtgccgatctggtcattgaccacacggacagtgtcatgtgtcttgccgacattcagcatagtcttgataaagttcttaccattcagcccaaacacccaagcaatgcggacaatgaaatacttctccagtgtctggctgactgccaactcaccttccagctttgtctgaccgtatacattcaaaggcttataatccttgcagtccggctgccaaggctctgtaccctgaccatcaaacacatagtccgtgctgatataggtcatcttgcagttcagtttcttgcaaacatctgcaatgttctgcgtgccgcctgcattgatagcacgaaccttcgctactttatcatcatcctctgccatgtccacagcagtccatgctgcacaatggatcacggcatccggatttacttctgtaattactttttcagcagcgtccttatcagtaatatccagtgctatatacggagccttcgtcaccgcagaatcatcagcaacaccactgtagttttcctgaatatcagaaccaacaccttcatgaccgcgcttcagcagctcattcatcacatcatgtcccagctgaccgccaacgcctgttacaaaaaacttcatgttctttcctcctgttagcggttgctgtacattttctcataatagttctgatattcaccgctgatgatggtctcccaccactcacgattatcgagataccactggatggtctttttaatgccgtcctcaaacttggtctccggcaaccagcccagctcattgtggatcttggtcggatcaatagcataacgcatatcgtgacccttgcgatcaccaacatgagtgatcaagctttccggcttgccaagctccttgcagataatcttcacgatctcaatattctgcttctcgttatgaccaccgacgttgtagacttcaccaacacgacccttgtggatgatcagatcaatggccttgcagtgatcttccacatacagccagtcacggacgttcagaccctcgccgtaaacaggcagcggcttgtcagccagagcattagcaatcatcagcggaatcagcttctccgggaagtgatacggaccatagttgttggagcaacgggaaatggtcacaggcaggccgtaggtacggtggtaagccagaaccagcaggtcagcggcagccttggagctactgtacggagagctggtgtgaatcggagtttcctcggtgaagaacagatcaggacgatccagcggcaggtcaccgtaaacttcatcggtagaaacctgatgataacgctggataccgtacttgcggcaagcatccatcagcacactggtaccgataatattggtctggaggaagatacccggatcttcgatggaacggtcaacatgagattctgccgcaaagttgaccacgatgtccggatgttcttcttcaaacagtttatccactgcttcgcggtcgcagatatctgccttcacaaagcggaaattcgggttatccataacaggtgccagtgtggacagattgcctgcataggtcagcttgtccagacagatgatccggtaatccggatacttcttcagcatatggaatacaaagttactaccaataaacccagcgccgccggtaacaataatattcatgatttattctcctctacacttatctatgtatcatcactttacaactttttcataaaaaaatatcgtacagggctttctgatgtataatgagtttgctccaaaacattacaaaggaaagtgatcctgtacgacaaagacattatacaacgaaaagactctgactggtagacttcacaaatattttttgatttattttgaaactttttctgctccaacagcagatactttgtttttactcgttttatcaatactaacattggaatctgtacattccattcgatttttatatcagcactttttgtctgggattaccacaaaatccctcaataccttttaccacgcatattcctatgcaaaagttgattattcccactttatgaatatcacagctaaagttgctttgagaatgataccggattcactggcaacacagccgatatttctttgtgtggatgataccatggtagcaaagaccggaactcggtttgagaatgtttcaaaactctttgaccatgccgcacataatggttccaattatctgaatggacactgctttgtaaatattatgctttgcatacctgtatggaagaatgacagggtatcttatctttcacttcctcttggatatcgcatgtggcagaaaaaagaatcaaagctggaacttgctgcatccatgatccgtcaggtcatgcctgaatttcaggagaaaaagcaggctattatcctctgtgacagctggtacacaaagcaaaatctgggttcaatcgttgatgaataccagaatctggatcttatcggcaatgccaggattgattctgtcatgtatgatcctgctcctgcacataccggccgcagaggacgtcccgccaaacatgggaagagactttctgttgaaacagattttgctttttccaatgaaaagatcggcgattactatatcggagcacaccgtgtgatcaccaacctttttggatgtcgggaaattcaggcttatgtgaccgctactgaaaaagaacacggtacaaaacgcctgtttttcagcaccattttcccggaagacttgcagattttctgtgcctgtcaggaaaaagaaccattaaaccagacaggaagtgacaggatgaaatatattccgctgtttttgtactcgttccagtggaatattgaaacaagctactatgagcagaaaaccatctggtcactttgcagttatatggtacgaagctgcaagggtattgaaatgctggtaaatctgatcaatatctgttattgtgcaatgaagatcttaccctatcaggatgagcagttttccgaatatcgtacaaaaagtgtacaggagtttcgttttgaattaagtcagggtattcgcagccagatatttttgaccaatttcgttagaaacatcgaaacacatataaaatcaaatgttatcataaaggctttaaaacagctgattcgtcagcaagtctattaattataaaattgtaaactggtgtatgtatcttgttctcgttttctaattaatacagatgttcctgatacttgccgtccatgacgtccttcagatactgtccgtactgattctttttcatgacctcatagacttccatcaactcatctctgcagatccatccgttcagatatgcgatttcttccaggcaagcaatcttacgatgctgatgttgctcgacagtctttacgaaattggtggcatccaccaggctctcatgtgtacctgtatccagccaagtgaagccctgacccagcagttctacattcagggtgccgtcttccagataaatacggttcagatcggtaatttccaattcaccacgggcagacggtttcaggttcttggcaaactcgaccacacgattatcatagaagtacaagccagtcacacagtagttactcttcggatgttctggcttctcctcgatagaaatggccttaccgttcttatcgaactcaacgataccaaaacgctctggatcgtccacatagtagccaaacaccgttgcacccttgccgttttctgcattctggactgctgcctgcaggcgcttcttcagaccatgacccgcaaagatgttgtcgcccagcaccatagccacagaatcgtcaccgataaagtcggcaccaatgataaaggcctgtgccagtccatccggagacggctgaaccgcataggtcagattcacaccaaactggtgtccatcccccagcagattctcgaaacgaggagtatcctgcggtgtggaaataatcaaaatatcgcggatgccagcgttcatcagaacagacatcggataataaatcatcggtttatcataaattggtaaaagctgcttgctcgtaactttcgttaatgggtacagacgagtgcctgatcctcctgctaaaataatgcccttcatatactcataaccttccttttattactcttttaataatcccaataaaaaaatcgaattttacttttaaatcaacatgtgaagcgtatttattaagaaagctcttactatatttcggtgtatcacgtccacataatttcattgcagttatggtagttttcattgtacctttccgttttaattgcgctggttgatataaataaaattctgagtcaattttagtagtaaaatcctcttcaacgttaattcttccacttttaacagtcgcatccaataattgttttccaagctcatttcttgcaattataatatttcgaccctcatgttctgaaaaatctgggtgattattattatccaactgccaaaaatcagcacatacaatatcagccagttctcctgttccatccatgcaaaatctacaaatatatcttatatctcgtcctaaatattgaccccacgctactttatattccatcttgagttcgcgaccatctttggtattaaccgttgtaaaaccaggccatccgtttcctcgatatactagcgtatcacatccctgcctagaagttcccatttttttcaaaagttcatcctgtgcattaacactaggctcccctgcacaaaaaaaagataacaaataaataatattttttgtcaatttctcatttttatttaaatatcttctaagtgccattacatcacacggttttccaacgaatgcatactttttgtcactttgtactatctgtaaaatatctttgagtggtacagatattccatatcttgaaccacatctgcttatcacctcttcaactgtagtactaacgcaactaatcgttttagtctgatcatccgggtcatacgttgtatgaattattgcatcgacttttttattttctaataaataacaacatatttcagttaatgctcctcctgaagccgctttaaatctaatttttttattagatgaataacctatcaaagctttttctatatttccccatatatcatgcttctgcttgcctttataataaaaaacaggacaaacagaatgataaaattctaacgattctcctttttttacatcaacattaggaaaaccaccatctatcatttttaattctgttccttgtactgaatgacacagaccacacccggtacaatatgtatttatgtatttactcgactctttcatatctaactttcactttctaaatgtcattttttatcatttatatatactttaaataagtcttttcgacatatacacttattgtcagacaacgcagaattaacatacattcaactttttctcaacataactattattgcttttctcttaataaatgctgccaaagaaataataagaataaaactgtaccttaataatctatgtgaatagagtatagaaatcaatatagaaacaactatgacaactattgaaatcgccaatatttttttattatcaattgcatcatcatattttttatttttgacatttatataatgaagtaatgctaacaatgcataacataccattgtcgtatatccggctgccacaaatccaaacaatttaataaatatatagttcagaataatatttgatactgctgcaatcgttgatgctaccgtagcaaatgttgtctttttataaaataactctattcgcatatataatgaatatactgctgtaaaataaactcctcctgcaatcgctggtatcgcgtaaatgcccgctttataagaatcaggagccagtattgtcattatttccggagcaaataatgtacatcccaggcaaaatacagcaaaagtaagcattatctgaccactagtttttcttacactctcctcatcttgaacatctaagcgttcataaatccaaggtgacaatgatgcctcaattgacgtccaaagaatttgaatgacagaagcaaccgtatatgctactgaataaatagctgtagatgttgtatctatcatttttgttatcatgattctgtcagaacttgctaatatgtacattgacatataatgtggtataagtggtatattaaactttaaagcatagatacaataatctattcttaatttaaattgagctttcatcgcaattatcataaaaaagaaaattccgactacgatatttaccccttccatggcacatactcgtgcgattgcttcattttctgaagatgcattaagaacaaacaggactccaagaagtaatgaaaataatccgatacatacagtaataattgataatgctttatatttatattcataccgttgtctcccactccaaaattgatatgctggaacaaacaaaaaatataaaaccattacatacaccataaccggaggtatttcaaacatatttaataatggcgttttaaatatctcaaaaatcaaaaaaaacaaacctgtacaaacagctgttataacaactaatgcaaattgaaattgatttctattttccttaaactccaacattccattattaaacacaccttgcgataaatttaatgttacgattactgtcagcagactctgccaagattgaaatgttgaaactatcccatattgatcagctgacataattctcgtaaatataggtccacttattaaggaaatcccttttaaaatcaaatttgcaaataataatgccatagatgctttaactgccggagatgccgttttaaattttcttataacacctatcattttcttttctccaaaagacacctaatatcattttcaagcaattctaactttgcatacgattccaccactgacttttgtccacacccctttaatatttcatagttttgaatccatgatttacttttttctaatgcttcttccaaagaaaaattccgagctgaaataacatatggatactcaagatttccaaatagaccttcaaactttctactatatgaaaaaggaattgttgcaacccctgacgaaattgaacctatcgttgcatgcattcttgaaccaataaaaacatccatgttagcaatataactctttgcctcaatcggcgtattaaacggtggtgcaatctcaattttatcaccatattttttcttcagttgcaaacatacacgataatcattttctctagcatttggctgttcaagatctatcacatgtggaatgatatgaattttatattttgactgttctattaaccattccaaaatttttatatgatattgtttataatcaactgtaagaccaaaatgattttctttagcccactggctatcccatagcaaggatgatacgtttattccaatatttattctttcattatcgattttatatttggttctatcgtatggaagtttaaaagccatatctgaaccaacctttatttccacaccactttgttctttgataacttttgctgataaattatcacgagaatatactaaatctgcctttctaatcagtctcattgcccatttttttagtaccagattgttataaggaccgtatgtctgaggcaccaatactagaggagtcccactccaaatgaccatttgttttattaaatctgtttttatattccatttttttccatatatatcagaaaatccatctccaaatgttgcatcaaaaaatacatcacatgtttttaaaagtttaaatgcatttttccaatatctaggattttttaaattaatattacactgcttaaattctatttctggaaattgttcaggaatccttcctaaagttttattatatgtaaaattatatacataaagttttttctcatcacatattctttccatcatagaaagaaacgtataagttaaagcttcacatcctttatttgaactaataaaatcaaatccaaataatccaataatcattaagttctacccctttactattattcatatgctgttaaatatgctttattattacaatatgctatcaataaaaatatcaaacagaaaaaaattcttttttcatcaatttgatgaacaccaaaaaaggatatataatacgtgcccaagattactactaacatctttggaaaggatatacgtccttcccactctgaaggattctttacagcttgaattatcgattttataaacacctgtatataaacccatatcatagaaattaatccaataattccataatgatataataaattcaaatactgattttcaatacttgttttggttctaatatatgaataaattccagaacgttctgtaagtgaataagcgaactccgcactgcctcccattccaatccatttattatctatcgactcccaaacccatttcaataattctttcctatccccacttcctgttccatcaacatttcctagcattgctgcataattatcatcaaacactgcgagtaacatatatgcaacattctgtaatatatttaaaatttctggaagaacaattgaacaaataattaccgctaacatacccactgatgtaataattaataatttctttaataaaactttatagccacataaatacaaaagaataagctgacttattatgatacatattaatattgatcttgaaagtgttaataatgcagcaataaaaacaaaaccatatgctataccatatttttgttttctttcatttcctttactacaaacactaatacgataaactatcagtcccaatgcaaacatacaatagttacaaaatgatattgtttgatatgtaaaagaaataattcgtctaaaaccaaatcttaatggctgtaatgtaatctgtgcccccatattattaagcaaatggaaaacgttaaaccccgttatactttccacaataccaattattgaagcaactactgctccaataattaataaatcaactgcacggagaaatcgttttctggtattcaaacatttaattatcacaaaacccaccaagtaataacataatatctcataaaaatattcaacaacgcctttaaaaagtattgcgtttataaacataataattagccagattccaaaagcaatctggatattcctgcatgaagtagcaactgattttgaaattcccaaagccacacatgcaaatagcacgattcctaaacacataagtttaaaagcacttattcccattattccaaaatattgtggaataatgggataaataccaaacaccaaaaatattatagtatttcggatgttaagtttcatcttatctactaacctttctagccttttctaataatgatatcctgaacttaccatggaaattcattattcgccttcaaagcatcccgaatagcctctaaattcttgtatccagttctttcatcaggttctaaatatccaccttcagcccattcattccaagcatacataaaaatcatatcttttttgtatatcgattttgcacgttgaatctgcttgctcatatatttatttaacttttcaggtgtgtcgccaatatatacctgccctctatgtccttttctaggcgtattatcccatccaacaaaagcacccggtatattcttttcattttctggaatatgttctaaaattgccttccaggcttcatcataatcggttttaagaacagacgcatttttttctttccctttatggttgaaatatctctgcagatcaaaacctaacctcttttcagtttcagcataaatccgtcttttaatatttctcaaaaaattccacaatttagatttttgtactgctgatttgttgttcaaatcattccacgcataactaggttgaaattcaatgttataatcaaatctactatcatccctattcggcataagatcaaaagttaaattctgataagcatatttcatcccagaaaaaccattttgtcgtgctaactctgtccaataatcaagcatgtcattcagacaatcaatgacctctgccctatatataataaataatggtttattatcctccttaatatatcgattatctttgaaaaaaggaagtaaataatcaaaatgttctttccattccttctttccaccataaaactgaggtatcagtaccttactttcatttacccaagcttttgtccacggttcgttagcccaactaatacaaaacggtatatcaacttttggatttgcaagcatttgctccatcggtttttccaaaagcaattttcctccaaaccaataatgataataacaaaatccataaatgccatattctttagcaatgttggcttgccagattttaacattatcatccaataagttataataattttcattcattggaattcgtggttgttcatgtcctttatataaaggttgtgcctttttgacgttgacccattcagtaaatccttttccccaccattcatcattctctggaatgtcatgaaattgaggcaaataaaatgcaataattttcatagttcctcctacgtctttcagaagtagttctatttcaaaagttcttactttctccaaactactttcgcttaactcaaatatttttttgcaaaattatatcattgaaaaagcttacctgtgctttcttcttttaagatagatatatcctctctagccgtattgctgtatcatcaatattgaaccccgcattcgtaatttccatacgtgtattctttcgtttgtatccgttatacctttcaattacttcgcaccacttggatgttttctcatctaaacctatatattctacagcatctgttatttttaactcttgcgttatagtattagacacgatcaaaggcaatccatttgcctgtgcttcaactcctgcaactggtaatccctcatatagagaaggcattacaaaaacgtctaacatattccaaagccgattcacttcatctgatagaccatgaaaaataacaacttcctctattcctaatcgctttactttttcttttatttgattttctgtttctccaatgccaaccaaaaacaatcttgcactattatcatgcttatagacttcataaaagatatcaatcagaaattcatgatttttctgtacattaaaccttcccacatggcccaaaacaaaattattctctaatccatatttttttcgtaattcagtgcgaacttcgggcttaaaactgtgtttatcataatctacgccattcttgataacggtataattttccgcgtcaacgattttcttcggaaacatgaaccttgctgctgcatctgagcatgctaaataatctgtaatcacaaaaggcataaaccacttgaatacttctgataattttacgagtttctggccaggatagtagctactattatgagagtgataaattattttttttgcacctccgatttttgcagcaaatgcaaccaatacttcatatggtgtggacgaatttatatgtattattttaatctgctcagaatgaactaatttaataataccgaaaaatttcttcaagcctctaacaatcggatttttaacagtttgtaaatccactcgataaatggtactatgtgcttcttttgcccttttagaggcctgatcaaaagtatcttcaaatgttaaataatcaaactgaaccttttcaaaatcaattttttcggacaatgtgagaacgagttctgttataccgcccatgcgaataggagccatatgcaatactcgaattggattattgccattaatctgctgtttcattctcaccactccttcccataaattctctttgatacttctctatacttttctttttattatataaaattactgcttttcctattgggccagtataacgaagagatcttttaacaatatctccaataatcatttttaatgtaataggtgcatatttatttgttaattgttcgtatgtcattaactctctatcatgaaaaaatgcttcccgattttcacttttctttgccgacgcaataagcatagaaccctctgttaaaatcaactcttcgctatcaactgattttattctcatcttatctattacatcaggttgctctaatagttttttacctttatcactatgacataagatactagttgttcctatatcatcatccatatctttattataagaacctactaatgcgcaatcaaatatggttatatcgcttacacgatgttttgttttaaaagcacattcataacacgatggtcgcaatgtaattcccttgaacataagccttgtaaaagtttttatatcatttctacaatcaattgtctttccattggcaaaatagactttaatattggttgctgaatacccatatgttttatctctaaagacaaaattggaaattttacctttatacttatgctctaaaaactgaataaaatctttgaacactcctggtgaaggaactccatggcaagctaagtctattaaatataaattttctttatttcttttaatataagattcaaggccagctacctgacagggcatacctataaaaagtacttttttatctgcatctaactgttcttttatacttttaaagcaatctcccagttcgctctgaacatactttgaaccttgaaatttccccagatcacttatatctgtcgccattgtatgtctgcaaactctatcatccgaaaactcgcagccaaatacgactccaccgcatgaaataacatattctgcaattgcatttatagccgcccctgatgtactcttcaatctaatggagtcattcttattctgtacaatataaccagatgtggtttcttctcctatttttcttttatttaatataggacatacactattacataacccacattctacacacctatttttatctacccggggatatttaaacccttcttcatcaagcttcatttcaattgcactctgcgggcaaacagcatagcaggctgtacatccgctacaattcaccttatcattgatttcaatcattcttcccaagcgcctctctaatataagcaaccgatatggctttttctttttccaatctttcatcgactctgtcataatctataggctttttcatttgctccaacacatcaccagtatatcttctagatgacagtccagttatgtcacaaagattagctattcttgaattacgtgacatcattaaaggatcactataacggtcaaatgctaaaaattgcttatgatgcaatattgaaaaaacagtacaatggaacgagtcggtacatatatattttgcatagcgaattaaattcacaaattgctctgaatctatatcatacaagtgttccgcattaaattgcagatcgtacggaacaaattcatctatatgcggcatatcataaagaggaatacctgttttcctagatagttcttccgcaacctttcgatgttcggaatttgctcctaaaaaataacaaaagatataatcattttctaatacaggttttacaggaattgcttgtgcccattcttctttattcagtaataaagttggatctagaacgactacggcttttcttcctgttaatcgctcaatgagttccgcaccgcttttctcgcgaactccaagcatctctattctatttaaatattcgattgttcttcttttctgataaaaaggcacctctgtaacaccaaagctagttgaatatgaaacacgttttactttttcatcagcaaacatcaaattgaaaaaatttgttggcaatccagctggaatccacagctgatcgccaccggcaactacaacatcatagtttttacttcctgccctaagtgcttcaaaaccaatatatggagctgatactttatctttcaaaaaattctccagaaatctatcaaatgctctttgacgaatcgcatctttcatcttgatatcaggatgtttctttaattgaatctttttttcaatcaggcgaaatttttccttcataagatacttattcaacaatctgggtaaccacttgattttttgaatcgtattaagtttttttctatagcacaaaaactcacagtcatatcccaattccacaaatttcacatatgttgcataagcttgcaacatgctgccataattatgattgtcataacatgtacaaataccaattttcatatacttttcctcttatacatccattaacaagacttgcttataagcttgttcaattcgatttaagtgtgcttctagcgaatatccctcttttacgattttccaagaagcttccccgaatgattttctttcttttctatctaaaagtatttccgtaatccctttcgcaaattgattaacattacccggatcacaacagtaaccattctctccatcatgcacaatcttgggaattccacccacatttgtacttacaactggaagaccataccccattgcgtccaacaccgacattggcattccctcgttataagatggtaaaaagaatacatctgcttccctaagcagtttatccttcgtatcaccacgaacccatccagggaatttcacattatcggatatacctttttcagcaatcaactccttgattgctttctcatcagcttcgcttcctgctccagctaaaacaaaaatcacatccggtatactttttttcacctgtgctataaccgccggaatatcataacagccttttctttttcctaattctccaaggaacagaactgtattattacattccctctgcatcctttcctctaaagcatcttcatgaaggacactatagttttcaattatttcaattctatcttccggaacaatctggctcaatcgttctttccattcctcagaaagagcaatcaacacgttacatttactatatacttttttaatcttagcctttttttcttccggtgcatttacatagaattcgtcaaaatcagcaccatgtatgtgattaacaatcggaattttacgccaggatgccatataaataaatggcatctttctataaaatgaaggtccaaaagaagaatgaatgtgaaccacatccggcttatgaaacattaatacatatgcaaaatgaaaatatccgcaaataccttttaaaagcttatcaaatttgcttccatctttatatgactctacataagttatttcatagtccttctctagttgtgatcccctatatccatttacgaccgcagctattccaccttttaccattctatttggaacaatcatacatactcttttcatattcactttccccttatcatcgcgttccaaataaacttcgtattagtgctccaatatctcttaaacagtctcttcggatcttgtactaaacgatacacccactccagattatgtttctgcatccacatcggagcgcgcttaatattttctgcataataatcaaatccagctccaacaccaagcatcagtccatcaatttttccctgatgggcggccatccacttttcctgttttggcgctccaagcccaacccagacaaagtccggtttagtttcattaattctctctataattaccttatcttcctcttccgtcagaggtctaaacggaggactgtacatcccagcaatttgaatttctggatatttttccatcaacttcttttgtagcaattcaagagtttcttctttgctgccataaaaataatggcgataccctttctttgcagagatctcaaaaatctctcccattaaacttggacctgttgtgcgctccatattcttatgaccgcgtttctgaccaacagtagaaagaggaccgccatctggaattgccattaacccgccattttgaattgcgcagtaatccgcatcgtcaaaactggttacagttgtatgtacatttgagacacatatatagtctccttttatttccgaaatatttttttcgagatagtctaccaaccactccatattgattgccgcaatattaacgcccataatattgcaagttggaatgcgttttttatcaacctttctcttatactccatttctcgcacctttccctctttttctacttatacggaaggctcatattgagccgagcaatttatataaaacagtgtggttatcatccatgccggataatctatcgcactgtggttatcatttttctcacaatgacatctatttttccgaccgtcactgagtctttgatgtagacctgtcatgggctactcacctaacttgttggcatatgaattttgttaaaactgtacacatctttccatccattttctacaagtaaccccatccacaataacaacaaaatccgctccacttcatgctcctttgcattccatgtgcggactttgccgaattttcttcataccgatccttccctcttcagaaccataattactgttttaaacagtattttaatatccaacccaaaattccagttgctgatatattctgtatccagtcttacaacttcttcgaagtcagtgatgtcgcttcgtccgcttacctgccacataccggtgattcccggtttaatagcgattcgagccctgtgatgtaattcgtattgacgcagttcgtcctgaaggatcggacgagttcccacaaggctcatggttccatttagtacattccagaactgtggaaattcatcaagggatgttttcctgataaattcgcctattccggtttttctggttccgtccggcaaaatcttatttccgattactcggggatcgaaatcgagtttgaacatacgtccatcactcattttgttctgagccatcaattctgctttccgttcttctgcatccatatacatactccggaatttgtacatcttaaatggctttccgttttttccaatccttgtctgtgagaagaaaatcggacccggagaactgatgtagatagccggtgctatgaaaataaaaatgattcctgtcaggaagcagcccaccagtccccccagaatatccaatactcttttggcaagtgcctgtctgtctgtggcatagttcatggtggttgtcagaactgtatatccgccaattgcctccacaaattgtttctgtccgggagtacttctgacttttgccaggtttacatgaaccggcattcccatttccagcaactcttctatcagttcctgagggtatggatatgtttcatctacatttacaaagacctcatctacccactgctgacagataaaggatgatgcgttatttaagtctgctactaccgggactcctgcaatttctttccctgtcatatctttatcaatgagtatcagaccattgatgttgtagcggttataattgtgttcttttacattttggattacttttgatgcaaggtcataattggttacaatgtagagagaatgctctccaccttctgccattttatgtagcagacgttttttccatattattcttgtacaataggataaaagcacatagaaaattcccataagataaaggattattcttgaaaaggcatgtccgccactgacagtaaacaggtacagaccacttgccagttcaatcaggatcatctgccggataacagagcgcagctcctgataacgtcctcttctcagaactcctttataagattcaaacaaaatgatcaggaacagatccaccaatatgacaaatatcatcacattgcgataaattcccagtgtaaacaggttcctgacagaaccgtttcgaatcagatacgccagtattaaagccataaataaacacgcaagatcaattaatatgaaatctttgtgtttataccatcctcttgattttttcctgtacatacgttttcctaacctctccttcttttttattcaaaaaggcatatttacagaatcgttttcctgtaaatatgccatcattttttattattcttttcttataatttccaattccaccttcatttctactgttcttccgaacatttctatttccaaatatgctattcttttatgtctgtctatcctgcggatattgccttccattcccatcaatggacctgacaaaatccgcactctgtcgttctcaataatacctgatgacatctcaacaagctgtttgtctgtacctattctcataagcaattctacttcttcctgcaccagcgggacaatctgatctccaattccaatcagtttcgtcaacccgataacctttttgagtccatttaccagacattccagattttgagcaattaaaaagacatacccgggaaagaggattctttcctggatatgccattcaccctgaaatcgtttcttctgttggtaatatgggataaagcagcgttctaaaacattgctgcttattaaccgctgacactgacagcggatgttttcttcggtgcctgtgcgcacctgcatcacataccacattggatatcttacctccatattttgggtatgcttcgccattctgcctgtgtttcaaagcagactcatacttcaagatatgtattatccatatcttcaaacgcggcaaagcgacgatttaaagacaaaagatttacgtcgtgttttattataactacatcaataaaaaaatgcaacatatttctacaaaaaaacgctttcgctgctgccaaaacatgaccagtagcgaaagcgttcattgtatcttctttttcagctaaaattattcagctgtgtcttcctttgcatctgcaacgattgtgaagtagcaaaggtcatctaatgcgactttgattgtttttttctctttgtctacattgatcggatcaacaattgtccattcctttgtttcttcattgtagcatacaagctgaatgttctccatgtcatctgtgatgcttggaactgagaattcaacttcatatttgccatctgcgttctttacagctttgacagagtcaagaactttgaactgtatgaaacctgtaacgaaatcttttccgtccagtttctcaataacttcttcaatcgcagctttgagtgtttcatctgtttcttcttctgcaagagtcttcagaacatctgcgaatccgttcatgtccatctcgccttttccaactttctcaaaagcatctgcaactgccggaactgcttctttcagttctttgaatccatcagtatcttcgatcttctgaatgatctcatagacctgggaatcttcctgaactactgtaacatcctttgtacggcttccatctgcactgacaccaaacgcacatcctacactgaggactgccgctaacgcaagtgccatgaatttctttgcaattttcataatgcacctctccttttggattataatttatttagataatagcacaccttgcactatctacctcttaatataataaaacaaaacataaagaatatcaatcaatttttgttataaaacatcgaaataatcatatccgtcagttcatcttcatctacatggtattcatcgaagttctctccctgtgttccttctcctggaacagttcgggaatctgtaatttcattctgtgatgctgtcaaaagttttgcaaaaacatcatttcccatgtttgtaactgtataattgtcgatactgtcatacagacctgttacaaatccggcatctttggatgcctgctcctgtgccttctgcagaaacgcctgaagatatgtcttctgacgctcctgacggacaagagcactctgactctttcctatgtcacgataacggacaaactgttctgcattctctccggtcagcgtaaccaccgagccttctttaaaatccggatttatatcttccagactgttatccggcactgtgatctccacaccacctacataatctgtgattacagaaattccatccatattcatggcacaatatccctgaacaggaagaccattcagaaggttggaaactgctgttttcatcaattcacagctcttctgcctgccatcaccgtacgcatactgaatattaatatggtctgttgtcattcccaggctttttcccgcaggattaaagacttctattctggtcatagaatctcgtggaataaacagaacctttatcttttctgttgcacgatccatggacaccaggaaaattgcatctgcctgcccggcatctacctgtgactgataagtatctacagtttcccttgtatcaattcccaggaataaataattgctgagatgatcgttatatttgtatgtctcacctttatattccacgatatcaccgttttggctcaagtccgtctgattccggctgtcactgttctgaccgccgttttgtggcgatgcagcatttttctggcttaacagataataaccgccgccaagaacggaaagaactatgatcaggataataatcaaaagcatacagatcttgcgctgtctgatggcttttcttgtggtttttgtcattttcattccttcaatctctgtatttcagttatctcatcagtttttgctgatgtaattaagctcctgcagtttctgtaatattgcctctgccattgcctgctgggcctcataggtagaagacggctgtgcagtcacatttgcaagactgatatagtgttctccccatttctggctgagtacctgatccagtgcttcagaagttacgcttccgtccatagggcgtgttcctactacaataaactgatctttattctgaaatgtatttaaaatctgttcctgctggtctgccagttctgcaggatcatgattccagccgccataatatcccatgaagataacaggaatacaatccatatcatttcttgtagtctgttcttctgtcaaatcacgtattccggtctctgtcacattcagctgggcaccgtttgcagcctgctgatgtctggtaatatagccctgaagggtttcatcacttacaccagccatcttcatcatggaaagagtgccgcctccctgaagtgttttattgattactgtcatattatagccattatcggtcagaagcttctgaagtactgtcatataggaatatgtattggattcttccccattgatcagatcatctccccagcacacaatgcctgaagcagctgtcgtcttatcttttgtatcttctgtcttatctgcatcttctgtgtcagctgtatccgttttttctgtgtcttttgtgtcttctgtgttctttgatttaatgtcttctgtatcttctgcttcttcggaagatatctcctccagctcttttgcacgttcttttactgcttcgtaatcttcaatcccactctgctggtcgtctgcaatttctgacaggtgtctggattccttctgttccgatttataactggtcacaagaataaagcccaggagaactgccagaagaatgcagataaagcccagtaagatattcgtcttttttatttttttcttccttattttgctcacttttccaaattctcctttatcattgatcatggtttctgtcttactgccagataactgcccgtattatttaatctgggcttcttcgtcacttctgcgataatactctccataatgcttataataagaagaataatatttgtcatcactggtatctatcttgttcataacagctccaagaatacggcatccgcttctttccaactgtttaaatgctttctgtgcatcccggtacctgacatttcccggttcgatcagaaagactgcaccatcgcagcatcttcctatcactgccgcatcaattactgttccgataggcggtgtatcgatcaggatataattataatattctctgatttcctttaagaataccttaaagatattctcactgagaagtcctgacggattcggtgcacttggacctccgaatatgatatccatattcggaaagtttgtagaataaataatctcctgtaatcccacctgaccgctcagaagctgtgagagacctttcacttcctcttccacacccagtcgtccggcatatgcagtcttcctgatatccgcatccagaaggagaaccttcttgccaatgctcccaagctcccgggcaaggctgagtactacatcactcttaccttcgtttggataacagctcgtaaccagaattgtctttatgctctgacccgacagctgaatattggtacgcagcgttttgatcgcctcactgtaaaaataatccgggtttcttttatctgttaaattgagtttcttcattgctcagattcctccatcagtttaatggtgcttcttattcttgttctttgatttcctgttcttcgcatttataaaatcttttctgtcaggaaccttggcaagaacagaaactcccaggtatttctcaatatcttcctctgtcttaatagtatcatccattacagcgtatacaaccacgattgccgcacatgcaaggaaaccgagtaagaagccgagtgctgcattcttctttacacttggagaagttcttacagtagcaatcttaccaacttcaataatctttggcggaataacttccattttatcgccaatataggatgaagaaacattcgcaatctcatctacgatcttctttgccattttagaatctgtattattgacagtaatctcaaggatacgggtatctgtaggattattgatacttacgctttctttcagttgttctgcagtcatatccagattcaaatctgaaattacctgctccatcacaggagtacttgtgatcagaactgtataatcactggtcaggctggcacctaactgcagatccgccagtgatgtcagtgtggtttcttttgaaagtacaaggatactggatgtggagctgtaaatcggtgtcatcaaaaactgtgtatatgctgctgcaatacagcctccggcaagagcaaccatcagtaccagaaggatttttttcttgagcgcataaaatatttccagtaagtcgatttcgacttcatcatcatttgcatcgggtctctgtgctttgctgctctcaaagttactgttcaaattgtctaacatctgataatttccttttcccttttttctttatagttttgtacattactgttcacaggtaatattctgtcttatgtatttctgaaagtaaacagcaaaattgacataaaccgattttattgtatatcagccaataaaaaaagtcaatctgtagcctcatgtttttgtttctgtttcagaatttctgcaggattatgaataaacagttcatctgcatagtcctgcccgaatttcgctgaaaccatacgatatgcctcgccaatcctgctgctcctctttgcactgttgtgacagtctgatccaacgaaatgaaggagtccgtctttcatgattttattacagtaccgtttagtaaaaaatccgtcttttcctgtgatgctgtctgcattgatctgcatatagacacccatatctgccagttcttccacaaaatccagactgttgcgtgtggcttcgtaacgttctatatgtgccatgatcggcttatatcctccggagagcaatgcaccgagacgttcccgcatatagctttcttccgagttatgggaaaattctgtaagaacataccgtgaaccggccattgtcattactttctgttctctgagcatgggaagcatctccatattggcgtgaaactcacatcccagatacacatggagatccgggctgatctctgatgccgctttctccaccagtctgaactgctctctgactttctccgcaggtgtttcaaacatccgaaagcggaaatggggagttgcaataaccgtccgcacgccctgttcatattccatccggagtaattttacggtttctcctatatctgtggctccatcgtctacaccgggtacaatatgacagtgtatatcataaattccttttatggacatcctatcattccgttactgaaaacttataaaaagttataaacttctatgttccattcctacttcaacgagtatgcttttgatgatataaatatcaatctactcacaagttcctgtactctccataggcgtaaattccggactaacgtatccgtacatatttgcattaacgtttcagtgtcagcttgcaaatttttctccataagtcttgagatttatagatgcctggaaatctctgtcaatcatattcccacacgcacatctataaactctgtcagataacttcagatcttttttgatgtttccacaacagctgcaaagctttgatgatggataaaaacgatcagccacaataagcgggattcctttatcgctgcatttgtattcgagctgttttctaaaccaaaaaaatctctgttcctggactgctttggataaatgtctgtttttcatcattccgctgacattcagatcttcaatacatataaatcttggttttcgatttatgatctcagatatggtctgattcaaatagtttttacggatatttgttaatctgtgatttcgttttaataaaagtttttcctttttgattacattatttgttttacagtaactttcccctttcttatttttctcgtaagaacgagagatactacgctgtaatctgcgtttctgtttttctaatttctttattttctgactcttattgatgttcttatacttagttccatcagagcagacagccagttctttgattcccaagtctataccgactccgtcatcattaagtatttccctacagtcaggaaattctacacatacactgatccaccagttcaatccgtcaaaggatattcgcggattcatatatttagcatctgtcggaattcgtccatgttctgcaagtcttacccaattcattttttgcttatttgccttcctgctggaggaaaagccttcaaatttaacgtgggtattactgaatcgtatcttaacgttgtcctgatagaacttcggtattgatctcttttttgacttgaatcttgggaatttctgcaaacctttgaaaaaattcttataagcagtacaggcatctttgattgcctgtttggttacattatttgaaatactcagtaaccatgcatattcatcagaatgtctaagctttgtaaattcttttctgagttctgcatctgaaatgaatttttcacctttttcatagttttctatttccctggccaaagcccagttataagcaaatcttgaagcacctgcgtactgaaacatcttagttttctgtacattgtttggtatcagcattacttttatggcttttaccatctgtttcctcctgtatcagttcacggataagtttcttagctttattcgctggttttccctgtaatttacaactgaatactgtgattatctgaaccagatcctcaacaagttcctgctgttcggatttttcagtattatcaatgatctcaatctcacaattataaagtgaagcgatatattctatcagctcaaaaccaaatcgtaatagccggtctttatataaaacaacaaccttttcaacctgattttgagatattcgcctgatcaattcctgaagtccttttttcttataatcaatcccggaaccgatatcacttattatctcaaatggctgtccttttgccaaaagatatgtcttaacattatcaatctgtcgttccagatcatctttctgtttatggctggaaacgcgacaatatccaattgtaatgcggtttttaggctttacatttattacctggttgagttgctcatcagaataatatctatagccacttactgtagtatgatgcggatgaagttttccattggcatcccaatttcgtaatgtctgggcagatacgcctataatttttgaaaattcatgtatagaataatatttactcaaagaatcaactcctttcaataatattctactctaatatcttataacactcaacatgtacttatatgattttataatttatatttaactgttaataaccttcctgactgtctgcagcatttctgatgctcctgtaactgctgaccacattcgtaatctaaaaaaacaatcaaccggctctgtatgatcatcctcatacaaagccggttgctgaatatttatgagtattctcttaattattcttctgtagcttcctcagccggtgcctcaagagctttcatgctcaggctgatcttcttgtcttcgccgttgaagtcaacaaccttagcttcgatctcctgtccgatggaaagtacgtctgaaggtttggcaacgtgctctctggaaatctgggatacgtgaaggagtgcatctacaccaggtgcaagctctacgaatgcaccgaagtctgtcatacgtgcaactttacctttaactacgtttcctacagcgaagtcctcagctgctgtgagccatggatttgcttctgggaatttaagggaaagtgcgatcttctctccgttgatctctttgataagaactttaactttatcgccaacagtgaatactttcttcgggttctctactctgccccaggacatttcggagatgtgaagaagtccgtctgctccgcccagatcgatgaatgcaccgaaatctgtaacgttcttaactgttccttcaactgtgtcgccaacatggatcttctccattaattctttctgtttctctgctttctcagcaagaagaagctgcttacggttaccgatgatgcggcgtcttctcggattgaattctgtgataacgaattcgatctcctgatctgcatatttggaaaggtctttctcgtatgtgtcggaaaccaggcttgcaggaatgaatactcttgcttcgtctacgtttacacaaagtccgccgtcaagtacctgagttacaggagcttttaatacttcctgattctcaaatgcttcttcaagacgtttgttgcctttctctgctgccagtctcttgtaagtaagagtaacctgaccttctccatcgtttactttgagaacttttgcttccattgtgtctccaacgtgaacagcatctgtgagtacaaggcttgcatcgttagagtattcgttctttgtgataataccgtctgctttataaccgatattcagaataatctcatcttcttttacatcgatgacagtaccctgtacaatctctccatttctgatagtctttacggaatcttccagcatttgttcaaaacttaattctgacatgttcttgaacctcctcaataattttgtttggggtggaagcccctgctgtaatacctacataactactgcattggaacatttcagaatccaagtctacaggtgtttgtatatagtaagtatttccacattcctttttacatatttcaaacagcttttgagtattggaactatgccggccgcctacgaccaacatagtgtctacctctccggctatgttttttgcttctctctgccgttcttcggtagcattacaaatagtgtttaaaatattgagaatatttaaaacattattatcatacctctttttgcaaagaatttcaactaaatctttaaatttgttgtaattaaatgtcgtctgggacacaatacttatttttttgccttttgggggtacaaatacttcggcttcttctttgtttctgatcaccgtgtacggtccctgacaccagccgcagatgccctgtacttcggggtggtctttgtcaccgatgatgatgatgtggtttcctgcaaggctttctttttccacgatcctgtggattttcaggacgaaggggcaggtcacatctacgtaggagatgtttttttctttcagcttatcgtagatgggtttacctacgccgtgagagcggatgactactgttccgttctgcagggtatcatccgggaaatccaggtctgcttctgtgataacgtggacgccacgggcttccagatccgctactacaccttcattgtggatgatcggacccagagtgaagattggtttctgttctgtgtcgatcagctcgtagactttgtccactgcacgtttgacgccgaagcagaagcctgctgtctctgctactttaactttcataaataaatcctttccttacccgtaaaagaatgtttgctgtatagcatgggaagtttacagttacagatgagtatatcttgtctgtaaagggtgctgtcaaccaccctatgatgcagcaccactttaggtgataggtagttgacgggcaaatagcgtagtctgaaacagataatctgtccgcctgaccgttatttctgtatcttcttattatacacatcaagaatagcatctacaacctgatcaattcccatttccgaggaatctacgagcactgcgtcctctgcctgtttcagaggggagatttcgcggttcatgtcgcgttcgtcgcgctcgatgatgtcttttcgaatctggtccaggtcgaaggattctcccttctgttcatattccagtgctcttctttttgctctggtgtctgcgcttgctgtgaggtagatttttacttctgcgtttggaaggatggttgtgccgatatctctgccgtccatgactacgtcgtttttctctgccagagttctctgaagtttcagaagatgagctctgactttcgggtttgcggagcttttggatgccatgtttcctacctgttcggtgcggatcatagcatttacgttctctccgttgaggatgacaatctgttctccgtttttgtattcgatggaaatgtcagcgccggaacataccgcctcgatctcttcctgattttctccgtttacgccatggttcagaagatataaagccattgccctgtacatggctcctgtatctacatagataaatgataattctttcgctactttctttgcgatggtgctctttcctgctcctgcaggtccgtcgatggctatgttacatcccatttttgtgattcctcctgtttctattatttaataacgtatagtcgaatcatatcatagttatatagcaattccataaaatactgcaggcaatccagtccatcatagcgtgaagtcctgcgtcagatatctttgtcgtgcatcagcacgcctgcagatatcttccttgtcctttgcactctgccgaactgtcctgattgcattattttgtgtaattgcttaatttgcttactgtatcgcctgcgctgccagatatgcggtagaccaggcaatctgtaagttatatccacctgtcactgcatccagatccagtacctcgcctgcgaagtaaagaccagatatcttctttacttccattgttccggggttgatctctttgacagagacgccgcctctggtgatgatggcttctttgaactcacccattcctgtgattgtgaaggggaaggctttgataaggtcaatgaagtgctggcgttcttctctggagatgtcgtggattttcttctctgcggggattccacccagttccagcattaccggagtcagagatgacgggaaaagtacgccaatcacgttcttgaactgtttgtttggtcctgcttcaaattcacgcaggatcctggcatccagctgttctctggtgagtgcaggcttcagatccagatatgcggacagttcgccgtttggtgctttcgccagttttgcaccaatgtgggcactggcggagagaatcatgggacctgtgactccgaaatgggtgaacatcatctctccgaaatcctcgtaaagtactttctttccattctttatggtgagtcctgtgttcttaagggaaagtccctgaagcttagggatatagtcttcttttgtctttaatgggacaagagaaggtgcaatgtctgtgactttcagtcccagttctcttgcaaagcggtatccgtcacctgtggaaccggtactctgataagagaatccacctgtggctacgatgactgcatctccttccatgaaggttccgtctgtaaggataacccctgtgatcttctcctgcggtatgtcaggtgatttttttccttttctgccttttcctgcatcagatcctgatcctgattctgttaatgcagcttctgattcaagggtatttacggaatctgttacagattccgttacaggtttctttacaatttcctgtacagcagtgtgaagatgaatctttgctcctgctttcttcagttcacgttccaatgcgcggatgatgtctgaggaatggtcagactgtggaaatacgcggtttccacgctctaccttcagagggacacctgctttctcaaagaactccattacatcctgaggggtaaatgaatagaaactgctgtagaggaacttgggattgctcatcattgcaggaaagagttcttctgtgtcgcaggcatttgttacattgcatctgccttttcctgtgatgaagactttctttcccagtttctcgttcttctctaatatatgaacttcatgatggttacgggctgcaaaaacccctgccatcattccggcggctccgccgccgattattataactttgctcatggaatattctcctgtatttattttaccctgcagattgtctatttcatcatggttccacgtctccgcttcgctacgatcaatatagatatgtaccactggcagcatatacccattggcacattatattcccgggtatcatattctttcataataacgcaaaggagcctgcttgcgcaagctccttttttcgtttggacatatttaattactgatcaattatacaggatatgctccgttctttttgtcagctgctttctcgtcaacttttgttttctgagcctgacggtatttgaagaagtccatagctacctgtgggaacagtgcgtatgttaatacgtcttcatcctgttccttgtactgagccatttcgctctcaagtttctcaagctcgttgtcaagaaggtctgcaggacggcatgtgatcggtttctcatcgccgatgcacttcttctgtacttccggattaaacggttttacagttgcgccgtattttcctaacaggatatcttttgtttcttttgtaaccattttgtatctctcgcccataagtacgttgaatacagcctgtgtaccaacgatctgtgaagacggagtaacaagtggcggttcaccaaggtctttacgtacacgcggaacttcctcgagaacatcgtagaatttgtcttctgcgtgctgttctttcagctgggaagtcaggttggagagcataccgcccggtacctggtacagtaaagtcttgatgttaacaccaaggttcttcggattgagcagtccgctgtcaagagcttcgtcacggatcggacggaagtagtcagcgatctcggagagaagcttctgatcaaatcctgtgtcgtatggtgtatctttgaatgtctcaaccataacctctgttgcaggctgggatgttcccagtgcaaatggagacattgctgtatcgatgatatccacacctgcttctactgcttttaagtaagtcatggaagctacaccggatgtgtaatgtgtatgaaggtcgatcgggatcttaactgtttcttttaatgctgttacaagctctgtagctttgtttggaaggagaagacctgccatatctttgatacagatggaatcagcgcccatatcttcaatacgttttgcaatgtctgtccagtattccagtgtgtaagcatctcctaatgtgtaggaaagagctacctgtgcatgagccttctctttgtttgcagcgcttactgctgtctgcaggttacgaaggtcattgaggcagtcaaaaatacggatgatgtcgattccgtttgcagcagatttctgtacgaagtattctacaacgtcatctgcgtatggacggtatccaaggatgttctgtccacggaaaagcatctgaagttttgtgtttttgaagccgtcacgtaatttacgaagtctttcccatggatcttcgtgaaggaaacgaagggatgcatcgaatgttgcaccaccccagcactctactgcgtgatagccgactttgtcaagtttatctacgatcggaagcatctgttctgtggtcatacgtgttgcgatctgggactgatgagcatcacggagaatggtttccacaattttaacaggttttttctctaattctgccattattaaatctcctttatagttctgtttaatcggatattcgcaatccgcttcgctacttgctcataaccaaatagctgctccgcagcttatcagaaggagttgcactcctcctgatacaagcaagatagcttgcttgatttggttatactccgaaaatagccatgaacgttccggctgctacggctgtaccgataacaccggcaacgttcgggcccattgcgtgcatcagaaggaagtttgtaggatctgcctctgcacccactttctgggatacacgggctgccataggtactgcagatacacctgcggaaccgatcagcgggttgatctttccatgagtcagtttgcagagcagtttaccaagcatacatccgccgaatgtaccgattgcgaatgcaacaagacctaaaactacgatcttcagagtatctgcgtttaagaatgcttctgcacttgtggaagcacctacggatgtacccagaaggataactacgatatacatcagggcattggaagctgtttctgtcagctgttttacaacaccgcactctctgaacaggttacccagcatgagcataccaaccagcggagctgttgtaggcaggatcaggcagacaacgattgtgataacgatcgggaacaggatcttctccagtttggaaaccgggcgaagctgatccattttgatcttacgttctttctctgttgtgcagagtttcatgataggcggctggatgattggaaccagtgacatataggaatatgctgccactgcgatcggtcccatcagtgcagactgtccaagtttacctgcaaggaaaatggaagtcgggccgtcagcaccaccaatgatggagatagctgctgctgcttttccgttgaatccaagaaagattgcaaggaagtaagctgcatagataccaagctgtgctgcagcacccatcaggaagctgatcgggtttgcgatcagcggaccgaagtctgtcatggcacctacacccatgaagatcagggatggtaagatactccactcatcaaggatgtagaaataatgaagaagtccacctacaccattggacatatcttccgggtttgccataatgtccggatagatatttacaagcagcataccgaatgcgataggaacaagcagaagcggctcgaatcccttcttgatagcaaggtaaaggaatacgcaggctactgcgatcatcaggtaattgccccatgtcagattgaaaaatgctgtctggtgaatcaggttggacaatgtttctgttacataagacatttgactacctcccgtcttagttcattgttgctaaagtatctccgttttctacagaggcaccttctgcaacatcaatgcttgcgatagtaccgtcctgaggagctactacagggatttccattttcatggattcaagaataattacgctgtctccggcttttactgcctgtccaacgcttgctgctactttgacaactttaccaggtacggaagcagttacttttactgcgccggcgcctgctgcaggagctgctgctttcggagctgctgcaggtgcagccttaggtgctgcttttggagctgctgcaggagcggatacgcttcctgtttcttcaacagttacttcatatgctgtaccatttactgtaattgtatagcttttcattttaaaatcctcctaaataaatgacaattatcttctatttctttttactttacggatagaacgaactacgaagccgtctgttgtagttccttctgctgctgcgatggctgctgcgataacagctaccagctctccgtcatctgcaaggttctcttctgcctgtgcaggtgctgtctgtgcgatggctgctgcctctgcctcttttgcagctttggctgcttttgcttctgctgctttctttgcttccggattcggaatgaatctgaacagagagatcagaaggcttaataaaatcaacattacgaatacagttccaatacccatcagagtattaagacctgctctctgaagagtcttgcccataccatactgtacatctacagacatggaagtcggtgttccctgtgagtcaaagacatatacaaagtttgcatctgctttctcaaatttaagaggaacagtaactgtgtactgatcatctttgaaagttacagtggtttcaccattgctgtccttctttgcgccaagttcatccttggatgtctgccaggactgcatggcacttgttgtaaagtcatctcctgaactcatgtaattctcgatttcttcatctttaagctggacaatggcatctgtcagtccttctgctgtagttaccagtgtggacttaacagtatcatcaaccttatctgcggcaaataccacagaggtgctgccgatcaccagcgcagccattacgagaaatgtcatgaatacagaagttatttttttgatcattttcatatgcgtcaccccgcttagaccgttccatgtttcttagacggacgatcttctctctttgtgaacagcatctcaaatgcaccgattacatattttcttgtgtcagccgggctgatcacagtgtcaacatagcctcttgctgctgcggaagcaacaccattctgaagctctctgtactgagcagctttttcattcagttcagcagcatctgcatctgcgtacatgatcttggctgccagggaagcatccatcataccgatctctgcgttatcccatgcatatacaaggtctgcaccgatagatttgctgttcattgccacgtaagctgtaccgtaagctttgccgatgatcacatttaccttcggaacagttgcatctgcgaatgcagctaccagttcacctacggatttcgccatcatcttctcgctgcataaggttgccatgaagcctgttgcgtttgtaagtgtaagtaccggaatatcaaaagcgtcgcagaatttcacgaaatctgctgcttttcttgcgcctcttgcagagatgcttccgtcaaatgtttctgttttcttgccttctgcgtcatatacttcgcttctgtttgcaacagcacctactgtagcgccgtttaaacggataaagcctgtaaccatgtcttttgcatagtctgcttttgtctcgaagaattcaccgttgtcagcgatctgggaaagtgcgattgctgtgtcacctgcacagtttgcaagatctgcgcatacgcggttaagatcatctgtacactctgtgtaattgtctgtgtcttcattattagaaggaagaagtgatactaaggaacggatctggccaagaatctcatcctctgtaccaacgccatcgatcacacctgtctctttgctctggaaatcagctgctgctgtgtcgcatttgtctgtgttgtttccttccagtgcgtttggtgtgttgacgaacatttttccttttttggattccatgaatgtgaaatctgtcagggacgggataactgccataccaccgccgcatgttccgaagattgctgtgatctgcgggatcacaccggatgccagtgtctgtttcagatagatctgtccgaaagcttccagtgcgtctgttgcttcctgaagacggatacctgcacagtcaacaagtccgataaccggagcgcctgttttcatggcaagatcataaagtcttgtgatcttctttgcatgcatttcaccaacagtaccgtttaatacagatgcatcctggctgtatacataaaccagtttgtcatcgatcacaccatatccggtgataacaccgtcagatggtgccttgtttgcagtcatgttgaaatctgtggatctggctgttacaccctgtccgatttcgacaaaactgtttgcgtcaagcaaagaagtaattcttgtgcctgctaagctttgtgttgcattactcattcttgtttgccctccatctttatgagaatatttaaaagttaacccaaaaatttagccgattttaattttaccttttccggcagaaaatttcaacatttatttgtcattttcgttaaaaatatagcagaaaaatttgtcaggtttctccaaattttgtttttttgagcatttcttcttatttaatagagggtattacggttattttgtattgtcctgtatttcaccctctcccgcaaaccagtgtgtgtttgaagcaactataccactcacttgtctgcgaatccgactacacaggtataaaagtctcagcaaaaccatagatgttttttattatatagcacgaattatcaattagatttatggattatcccattatataattaacacatcaaagaaattcaggccacagctaaagcactgaacaattatagatccaacagaaaatttcaggaggaaagacgtaatgaaaagcaattaccagcatattttcacaccactcacagtaaaaaatatgactatcaaaaaccgtatcgttatgatgcctatgggaaccaattacggggaacagaacggcgaaatgagttttcttcacattaattattataaagagcgtgccaaaggcggcacaggtctgatcatcgtagagaatgcaagcgtagattctccgcagggttccaacggaactactcagcttcgtattgaccacgacaactatctgccgcgtctgtacaaattctgtgaagagatccacaaatatggtacctgtattgcgatccagatcaaccacgcaggtgcttccgctgtttccgcacgtacaaatatgcagccggtttccgcatctgatgttccgtccaaagaaggcggagaaatcccgcgtccgttatcagtggaagaaatccatcacattgtaaagaaatacggcgaggctgcaaagagagcccaggctgcaggttttgacgcagtagaaatccatgcgggacattcctatctgatcagccagttcctctctcctcttacaaacaaacgtacagatgagttcggcggatctgtggaaaacagaacacgtttctgccgtatggtcattgaagaagtaagaaaacaggtcggacctttcttcccaatcatgctccgtctcagcgcagatgagctgatggaaggcggcaacactcttgaggatactcttgaatatctggaatatgttcaggatgaagttgatatcttcgatgtttcctgcggtttaaacggttctatccagtatcagatcgatgccaactacatgaaagacggatggcgttcctatatgcctaaagctgtcagagagaaattcggcaaaccatgtatctccatgggaaatatccgtaacccgaaggttgctgagcagatcctcgctgacggcaatgcagacctaatcggtatgggacgtggtcttatcgcagaacctgcatgggtgaacaaagtagctacaggcagagaatgtgaccttcgcaaatgtatctcctgtaacatcggatgtgcaggaaacagaatcggctttaaccgtccgatccgctgtactgtaaacccggctgttctggaaggtgatgtttataagaatcagaaagtaaacaaaaactgtaacgttgtagtaatcggaggcggtactgccggactggaagctgcctgtacagccgcagaagtaggctgtaataccttccttctggaaaagggtgagactcttggcggtcttgcttctgtgatctctaagatccctgcaaagaagcgtctggctgatttcccgaactatctgatccacagagcagagcaacttgagaatctttatatctttacaaacacagagggaacaccggaaaatatccgcaagttccatccgaacctgatcgtaagctccacaggttccgcaccactgcttcctccgatcaggggacttcacgaccgcattgacaaagaaggcagcaaggttgcttctatcctgggaatgattaatcacatcaatgactatccggaagatatgacaggcaagaaggttgttgttgtgggcggcggtgctgttggtcttgatgttgtagaattctttgcagcaagaaatgctgagatttctattgtggagatgatggatcagatcggacgtgacctggatcctgttacaaagaatgacatgaaggaccagatgaagaaacatcatgtggcccagcttacaaagacagctcttcaggaagtaaaagacagctctttccttgtaaaagatgcagaaggtgaacgtgagcttccatttgactacggattcgtatgtcttggtatgagagctcagggacagcttttcgcaaagctttccgatgcttttgtttctgatgatgttgagatcctgaacatcggagacagcaaacgtgcaagaaggattatcgacggaactctggaaggaagaaatatccttaatacactgactcagatgggataccttcaataaaaacctttacaacaaaatacgaaaggggatattataatggctgaaagaattaccggacatactgaattaatcggtctgatggcttacccgatccgtcactccagctctcctgcaatgcagaatgaggcttttgcaaaactcgggtatgactacgcttaccttgctttcgaggttggcgcagatgaaattgaggatgcagtaaaagcaatccgcactctgaaaatgagaggctccaatgtttccatgccaaacaaaactctggttggaaaatacctggacgagctttctcctgcagcagaattatgcggtgcagttaacacgatcgtaaatgacaacggtcatcttacaggtcatatcactgacggtatcggatttatgtctgccctgaaagataatgatattgatgtgatcggaaagaaaatgactatcgtcggtgcaggcggtgctgccactgctatcgagatccaggctgctttggacggcgttgccgagattacaatcttcaaccgtaaggatgaattctgggatcgtgcagtatccacagtagagaagatcaacacaaagacatcctgccatgcagttctttatgatctggcagatcttgataaactgaaagctgagatggatgacagctacattttcgtcaatgctacaggtgtgggaatgaaaccactggaaggacagtccgttgttccggacaaatcttacttccgtcctgagctgatcgttattgatgttccttactctcctctggagacaaagatgcgttccatggccaaagaggtaggatgcaagacaatgaacggtctgggaatgatgttattccagggttccgctgcatttgagttatggacaggcgaaccaatgcctatcgaacatatgaaagaaattcttcacatctcctatgatgactgatacctgatggtatcttcagtaaagatatctcatattgtgatgcagaacagatcatttcactgatctttctgcacataatatttgatatataccgcttttcggcgtactgcaggagatgtactgatatatttactccgcgcagaatgtacatatcctgcagtttgcttcaaaaagctgttgatcatgcggttatgttacggttattcttataacagttccataataatccggaactactataatacaacagaaaatatgaggataaacagatgaacacagttcaggtaaaaaacactgtgatcggcgagggcagacctaagatctgcgttccgatcgttggaaaaacaaaaacagacattctcgaagaagccaaaaagatcactactcttcctgttgatgtagttgagtggcgtgtagactggtttgatgatgtctttgctactgagaaagtattagaaaccgctaaagagcttcaggaagttttaaaagacattcctgttctccttacattccgtacttccaaagaaggcggtgagaaagaaatttctgtaaatgactatgctgctttaaatattgcagctgctcagagcggttatgtagatttaattgatgtagaagcatttacaggtgatgaagttgttaagacaatcatcaatgctgctcatgaggcaggtgtaaaggtaattgcttccaaccatgatttctttaagactccggagaaggaggagatcatccgacgcctctgcatgatgcaggagctgggtgctgatatccctaagattgcagtaatgcctacctgtaagcaggatgttatcacactgctgtctgccactctggaaatgtctgagaaatatgcagaccgcccgatcattaccatgtccatggcaggaacaggcgttgtaagccgcctgacaggtgagacattcggctccgctctcaccttcggtgctgcttccaaagcttctgctccgggacaggtcggtgtgcatgaattgaaacaggtgctggatatcattcacagcagtctgtgatctgttgatgaatgatgtgatatcagatgttattcttgcctatagctgatatcactcatattcgtcaacagattgttacaaaatttgaatttaataattatgactccttaaaataataattgatgaaaaccaagaagaacagccccgaatcccggctgttcttcttggtttttgcttatattattttttctcaaggggattccagttggacaggaaaacattcagtccgaagccaactgccagtgcccatgcagatgcccatgcggttccctgggttgcgaggactgctgccattacgcctgcgatcatcttgtctctgtcgctcttgcagtaatccataccgattcttgcacatacaaacgcctggaacatcagagtaatggaagatcctactccgaagatcgggcgaaagaagcttactacaggaatgattagcacacttaagaatgtggccagtctgaaagaagccattcctccgagaagagacttcattgctttctttccttctttataacgcatggatacggatacagtcattccaacccataacggaccggaaaggggaggaaatggtgcaatgatagacaggatcaggtttctcagaccgcttaccagattggaacggctggaattgaaatcaatatactcatcatctcttgcctgacgcgcctctgatacaagggtctctgtagtaacaaaatcaccaaatgcaataacatagcacaccagtgccagcggcagtgctttgataaacatagatgccggaggaatccctacgccgaagatactcacctgatcaatgatatctttaaactgaggaatcttgatgaaggtaccgatctccagtcccggggcatccagttcgccaaccagaagtcctactaccattgcgataagatatgggaaaagatttccgtatctcgcaacaagatcaagaaacttatttgtttttctcttctcctgatatttgtcagagaagctgatcaggatcaaaagacctacacctgcaacaatagccagaggatatttgtgcatatttccgttctctcccagctgtcctgccataactgtaaccggtgctgcaagaaggattccgcctttgacagaattgggaactgcatgaacaaatttatccgccagtctggtcacacccataaagataaataccagacctaccagcatctgcagtgcgatcatagcctgtattcgctcttttcccatggggaagccttccagaaatacaatagtcagcggcagggtcggtgtgatccaccccggtactaccggatcgccaagcaggctgtgaagcagataaaggaaggtttcaataattacacagctccacgccagctcataaggaagccccagatactgctccagatacggaacagcagccagagcagtaacgcccaggatcagaccctgaatgaactcaacagattctatcttgtaatgtataaatggaagtcttatctgaaatggtccaaaggggatgtagggcagttcattttctcttctttgtgttcttgtatttgccatacagattctccttttcaataaattgttagattacttctatatttcggcttgtatattctatcttttttgttaatttttagacaatccagattttaataaaatccaatccgaccggaaaaaatttgaagcttgtaacgtccaaacgtatcttcagttagattggatttcaatatcacaggatttctgtatcttatttatttctatcgcttatttatttctatcacttactggcttacttatttctgttcttctttacaaagagggcgagcaggataccgacgatggtcactgccatgttcagaagaaggatcattctcggagcactgcttccgccaactttggtaatgtaccctgcaaggcttaagattgtgtagttcgcgatgctggatgcgatcattaccagtgaggttgctgttcctttgttctcggggaagaactctgctgttgtggaaactgccagctggagaacaccgcctgcacctgcatatccgatcacaaaaccacctgccagacaaataaacggggcctggataaagtaacataggagcagcatgatagtggagattaacggatagatgatcagaacgttaatctctttcagaccttttttgataaatgctgctgttgcaaggatggcagttgcagttcccagggcatacagggactggatctttgaagggtctgccataccataggaacgggcaagttcctgattacagttcagccataacataaaggttgaggagctggtgaatccgatcagaattgcagcaatcgctgcaggggaaatcttgtgtccggatttcttcttatcagctttagcctgtactgccttctctctcgccggaaaggggaggatcagaattaggattccgtcaatgaggattgcaatacctgctacaataaagattgtcttatatgacatatttgcagatgctacgattccaatcaggaatggaagcaggaactggctcaggcagatggaaaattttgtaaacaggttggctactgacgggttgtttacatagatttccatacaggtagggcttacgcaggtatcgaggaaagagttcgcgattccgccgatcactgcaaaggcatatcccattgccatggatgtggaattggccattccaaagaagtatgctacataacagagcacaccgataattccgctcagttttcttccatatttatcagacagaggaccggagaaaggaagggaaatcagacgtcccagtccaagtgctgcaattacagatactaccatacttacatccagggtgccatcagccaggggcttcgcaccccaggcagctgcaaactccggtttgtactgccccaggatagaagcaccgattccatggatgaaataggtgaaatatgctgcaagggaggtgaaaatgagcattttgtttgttttctgtttcattttgatctcctaggttattattacttgttttcgttttcttcctggaatttctggtattcagctgttggcatttccagtcctgtgtagagtttgtaagctgcagctccctgccataacagcattccttttccgccgattgcaagcttgcagcctgcttctttggcttcttttaccattcttgtttcagcaggattgtaaacaacgtctgctactacaaggtcagggcggaacatggatttatctttgatcagagtaagctcttcgtgaggtttcattcctgcaagtgttgcgtttacgaggatgtctgcgtttgcaacctcttctttcagttttgcctcatctgccagatcaaatacagaaactttacaatccggtgtttctttgctcagtttctctgctgtggactctgcacgtgcaaagaatgggtctttcggattgaagatagaaatggattctgctccgtctaatgcacactgtacctggattgctgttgcagcaccgcctgcaccgagaactaccatttttttgccttttacgtcaacgccatgttcttttaagttgcggacaaatccgataccatctgtgatatgtcctactaatttgccgtcttcattaacgattgtgttaactgcaccgatgattcttgctgcaggtgaaagctcatccatgtgttttgcaacttcgttcttgcatggcatagttacgtttgcgcctctcattttgaaaagacggattgcatccagagcagccggaacctggtcttccttgatgtcaaatgccatgtaagcatagtcaaggttatgatgacggaagctgaagttatacattgccggtgatcctgagtgtcctaccgggcttccgataagtgccattaatcctgttgttcctttaattctctgttccatttcctttttgcctcctgaatttttttgtaaaatcattttcaagctgctgtccgctgataatatcatacagcgtctcttaactgcaactataaaacaaataaattataagattcgaaattcgctgatttactgcgtaaatcgctactttctcatgtttggcgggtcccaggttcaaaaatcttatcgtgcaagcacgaacgactttttgaacttttgaccctgatatcatcataatgcagaagctacctcatacgcttctttcgtagcatcaagtgctcttcttgcgcgggtggcatcgccgatcacataggtatccggtacgatggctttgatctcttcgccgaatgggttgtagtttctgaatcccatggaaaggatgacagaatcatagcctctggattcatgtctctgtccgtctgctgtctcgtactctacgccgtcctcatagaatttgcatacctttgcacctgtgatctctttgatcttgtaatcttcgaaatctttcatcaggtaaactctgtgctcgtggatcacgtcggcacctacagtgtctctgaactcaatgactgttacatcatggttctgctcaccgaggaatgctgctgtctcgcatcccaccattccgccgcctacaacaagaactttctttcctgctgctctcttgccgtcaaggagatcagagccatggataattgcaggattgtcgataccttcgattggaaggatcagtgttctggaaccggaagcaacaattacgctgtctggtttctcttccctgataagatccagagttacttcctgattcattttgattgttacgcctgctttctggcagcgtacgatatagctgcggatcatgtttgtgatgtcgccttttcccggaggataagcagcaagacgcatgtttccgccaagtttatcacttgcttcataaagtgttacctgatgacctttttcctgtgcgataaatgcagcgcaaagacctgcaacaccgccgccgattaccattactttcttagctttttctgcaggagcaatgccctcagcttcatgtccaaggaatgggtttacaagacagcatacagggtttcctgcatacatgtttgccacgcagccctgaagacatgcgatacatgggatcatatcctccagtctttcttcctgcgcttttaatggcatataaggatctgcaaggctctgacgtccgaatgcaaccaggtcgcagcgtccttcttttaccattaattccgcaaactgcggttctgtataacgtcctactgtgatcacagggatagatacggcacgtttgatctcttctacctgagaagcggagaaaccgccgtgtgtaactgtcggtgcccacataaattcatcgcggatgtgaacagctctggatacatggatggcatccagtccgcatccttccagatatgcagcgatcgcagcactgtcatgcacatcaagaccgcccggtacttcatcacagctgttgattcttgcaagaactgcgatctttccttctgtcatcttcttaacttcttcgatgatcagacgggagaaacgcattctgttctcaaaggaaccgccgaattcatccagtctcttgtttgttctcggagaaaggaaggtgcttaccagatagccgtgtgccatatggatttcaactgcatctacgcctgcttccatggctctctttgctgcgaggccatagccttttaccagttcataaacttcttcagttgtaacttcctttggtgtatctcttccacagtctgacggaatgcttgtagctgcctcgatcggtgcacctgcgttctttgcatttccttcaggacctgcattctgaagctgtacggaaacctttgctccctctgcatgacaggcatctactaccttgcggaagctttcgattgtggagtcatcataaagacatggcttgcgggggccgccctttgcgcctttatgtactactgttgcttcgattgtgatcagaccgaagccgccttttgctctttcacgataataagctgcggactgttcactcatgcttccgtctgtgtttgcaaagttgtttcccattggcggaactacgaagcggttctttactgtcattggaccgatgttgatcggctgaaacattgcattgaatttcatgtaaccttctccttttttcgaattcttttctattaattattcattctctattttgtgttcattcagaatgcggatcaggcaggcgtggagatttctgcctgattctttaatctgtcggtttatccgtcagatacttactgaagaacttccggccatgcttcctcaagcactttctttgtgttctcatatgtatggtttgcagcatattcaagtcctttttcaaggattgcatcgctgatgacttctacaccgattgcgtttggtttgattcctttttcttttaccatcttaacgaacgctgctgtacatccgattcctgttccgggagcaagacggtcatgcatggattcgtctcttaagattgttgttgcatatggtctttcccatacatcgttaatctggatggatacgatcttgtctgccgggatgtcttcgattacagaaaggtcaaccggctgatttgctcttacccagtgccaggtatccatgatcagttttgcattctcgcagtcagctgcctttacaactgcccagccttttttcatatccgggattccgctgtatggcattggctcaacaccgatgatgtattttcctgctctctggcataattctcttaatttctgagcagtatattctacggagtagttttccatcagaccgcagttgatctgttttacgtcaaataattcacacatatggaagcagagctgttctttgtatttctgttcgtaagatctgtgttcttcagcccactgtacgatgtactcaacctctgttactttcataccatgtttgtccagaatagcaagaatatctttgtcaaaaagtccctcattcaacgcatctacataagtttctgcacgaaggccgattccttcgtatcctgcgttctttgcagcgatcactctgtcttcaaatttgcactgatctcccagtgtccaggaactgatagtaattggaaattcttttgacatctttttgtcctcctgataaaatcgcataatttttctatttattttgataatattttgtatctttttgatataagcattatatatctttgttaaatataaaacaaattagttctatcctttaaattcatagattttttcaatacatcatgatataatctacgtatatgacaaatacagcgcggattatttgtgcaagagtgactataattatagttttccgaaacattaaaggactgtgaaagcctgcacataaaatatagtcacttataaaatacttatcagagaaaggagtttttctatgaacctgtatcatctgcggtacttttctacgctggctcatattgaacattacacaaaagccgctgatattctggcgatcacccagccttcgctgagttatgcgatctccactctcgaggaagaactgggcgtgaaactgtttgaaaaaaatggaaggaatgttactcttaccaagtatggaaaagttttcctgaatgacgtggaagaggtactgaaccgtctggactcttctgtgaacagtctgaagctggcaggtaaaggggaaggctgcattgatgtggtattcctgcgtacacttggaattgattttcttcctaagatcatgcggggatttctggaggaaaatcctactaaaaagatagattttaatctgtattgtgataaagttttaacatctgatattctgaacggattaaaagagaagaaatatgatctggggttctgttccaaacttgataatgagccgctgatcgagtttattccggttgccagacaggagctggttgtgatcgtacctcttgatcatccgctggcagtaaaggatgaagtacggctggaggataccattccttataaacagattatatttaagaagagaagtggtctgagacagatcattgacggactatttgaatgtatcgggcagacaccggatgtggcttatgagattgacgaggatcaggttgctgcaggctttgtctccaacggctttggaatctgcgtagctcccaatattccgatcctgcagtctctgaatgtaaagatccttcccttagtttctccaagctggcagagaaacttctatatggcaatgttgaagaacgtataccatccaccggttgtggaagcatttaagaaatatgtgatcgagcaggcacagaaggaatgggattataagaccagctgatctgacataataaaatatcagaatacaaaaagatatgggactgtcccgtcagtcgagacaccccatatctttttataataaccgatacattcaatattatgacttgatatccggcacttctgatatcataaaccagatctgtcatgttatattatttttcttcatccatggtgcggagtctgtgtaccagttcttcgcagatttccagttcgttcttgccgtctgtttcgatgatgatatcagccgctgcctcgtatttagcgcggcgtttctccatcagatctgcgataaatggaacagtcttattgttctcgatcagcggacggtcatggttatttttgacgcggtcaaggattgtctccggttttgctgtgaggagaacaacacggccattcttcttcatctctactacattgcactctctcattggagtaccaccgccgcaggagatcacaacattgctgcgtgactgcatttcgataagcagatttgtctcaagatcacggaaatactgctcaccgtatgtctcgaagatatcggaaatactcattccctgtctctgggcaataatctgatccatctctaccacatccatggcaaatacattcttaaggaaatcagaaattgtggactttcccgcacccatgaaaccgatcagcacgatgttgtagttgaagagttttcttgcctggatccgtttactgtttgtgcggatgcattcaaatacatcggaaacctcgtccttatggcgtctgccttccattctcttctccagccattctttctgcttcgcttcctgctcaggctgtaaaatctggagtccgttggcttctttatatgccataatgtcctccacgatcctgttacgcatgataagtgcatccagaatgatctcatcacactgaccaagactctctctgagtatttctaactgattcatatctctttcccctgtctttcctatgtcagcttgcagcagaccgcaaatcagccacaaactgccataaaatattcacgaacggcaatatataaatgccgactgttaaagtttattatatcaatgtcgctttcgcatagcaaccctttaaaccattgaattatttcatccgttcgatagtttttttctatgaattcaacaaacaattctatggcaagactctgatgacagttctttaaggttcccatatactatatctaatgaaaaaaatcatgaaatactttttcagtgtaccatttaaaactgattttttccactgatttctccgcatagaccggataaaaatctatcagttttccatccaggtaataggctatgcggccaagtttctcccccttaagaaccggcgcactgactttctgcgggatttctattttacaggttacagtttccccttttttcagaaggacttctttttccctgtcatatgcggttacactgcatttacctctcagatagattttcgttcctatatcctgaccattttccacaccgtctgttaccaggatttttccggtctgtggttctttccagtaggtttcgtactcatagttgtaatctccgaagtccagcagtttctttgtgtcactccatttataggttttgtggttgggccacccacagccaaggaggctgacgataaatgttttgccctctttctcccaggcacatacataacagtagcctgcctgggaagtatagcctgtttttccggcaagaactccgtctctcatgtcaagaaatgcgttggcattatgtacagaaaaggttctctttcctgtgatctcagagaatgtatagtctctggtctgtgcaatgtgcaggaatgtttcgtttttaatagcatagcgcatgatcagtgccagatctttggctgttgtgtgatgttttccgttctcatcctcagcatccaggccattgggtgtgataaaatacgtattcttacatcctatttgttttgctttccggttgagcattctggcaaagccttccacgcttcccccgcagtgttctgcaatggcaaccgctgtatcattgtggcttttcagcataagggaatacagaagatcctccagataatactgttctcctttctgaagtcccagcttcacttccggctgggatgcggcattctgagaaacctgaacataatcatcccccggagagttctccagtgccacaatacaggtaagcaccttggttgtgctggcatttgccagaggacgctccccgtccttttcatagagtactctgccggactctccgtccatgaggactgctgataatgcgtacagttctgccggttcttctgcaacaggtgtcatgtctactgtctgaggtattttgtactccgctccccgggcggaggtgtatgtctgcgtaaacaataataccgccgtcacaacaatgacagcggcaatatgtttcattctcatactccacctcacatgctggcaattcatgaacatcactgttcataatttacggttattcacagatctgttgtttacaggatatctgcaggattttgcttcaccctataagataatttatgcctgcatgtccggaatatgactgtcacagttccgaaaaatatcgggatatgcccattacccgttataagtccggtcccatcttttgctcagatgataagctccctctcttaaggtataaagttctcccagatattccacagcttcaggaaccgcctctctgtaaagcctctcaagttcaggcatgggagcttttgcctgctctactgcttcggcagtcatgaaatgttcaatgacagagccaatggactctcctcccagtctcagaagtttccccagaatcctgcgttttcttccatggtcatcacacaccatgaaattggtaagaattttcatcatcctgacagaaatataaatgtttatggttttcaccagaggaatggccctgtgaatcactctggcatattccatcttcggcatgatcccgcaggccggataataatggtcgggatctttacctgtctcttccataagcacacggtcaaattccttctccagaacaatgtgaggaatgactccttctgccgccatcttatttacatagggatggcatgcggagtccagaatataatgacagccaaatccaagaagatatgcaaaaagtgcctcatcatcatttcttctgacctgccgcatcccttcttcaaaaaaggctcttgccttctcatgatgcatctcaatcccgaactgggtgacaggattctttgaaaccatatagtagaacaggatatccggcccatgtaaaccgatcctgtacaagtccccatgtctgcggatcagggctttcatatctgaaggcagtctcttatatacttcttttccaaataaatcatgcgcatatgtggttggcattagttttttctcctttatcttacacatccagtttcagctggatttcttcctctgcctctgccttaaagtcctctatctgaacaggatcagggacaggcagggattccagatcctgtacgccgaagcagcgcagaaactcttccgtggtcccgagcaggatcggacgtccgggggcatccagacgccccagctccctgaccagactgtattctaccagcttgttgatggcgtggtcacattttacccctcggatcttctcgatctccgcctttgtaaccggctgtttgtatgcaatgatggataaggtttccagcataacatctgacaatgccggcttctgaggatgcagggcaatattgatcagatactgataatattctttctttgtacacatctggaaagaattctccagctctatgatctggatgcctctgttctcttcctgataacggtccatcatattgcggatgatccttcctgttgtcttctcgtccacaccgatggctctggcgatccggggcagttctacggaaccgcccattgcaaaaagtattgcttctatcgcagcttctgtctccttaatcttcactcagtcttcctcattccttttattacatattgatctctgtattctatggttcatcttccgcaaattctgtaagattcttccatgtatccgggtctgtctgtacttcaacagagatatcgtcaaacagcccgtcctgctccacatggatatgtcccattttcatcagttccagtatggatagaaaggtgacgatcacctgtactttcgagcactgactctccaggagatttcggaagctgaatttccgatgggtacgggcaaaatctttgatctctatcatcttatcagacagactgacctcttccttctcgatggttccgaatttgcttcggataggatcgaccttgtcttcctgcctgcggatgatggacttgtagattgcattcagcttctccagtgtgagacctgccagaagttcctttggatctacaggctctctgtactgcagtacctcatcgggaagagtgggctctttaaagaatacatttgccgcatcgtccatcttgtccttcagcttataggacataaacttatacatcttatattccagaagtttctccaccagttccgctcttggatcttcctcttctccctcctcattgacttctttcgggagaagcattttacacttgatatccagcaatgtggctgccataaccataaactcgctcataacaccaaggtcttcccgctccatggcatggatgtattccatatactgatctgtgatctccacgatggggatatcatagatatctattttatttttttcgagaaggtgcagtaagagatccagaggaccttcaaatacttccagctttaccggaattcccatagcacagtcttttccttttcaagtaaatatttcgctgccatacagtcagcagacagtaacaatattctcaggcattcggtttcagatccaccatcagcaattccctgggattatggatccttacaggtatggtgtgttcccctgctcctgcgcttaccagcatatgctgttccttcctgtggaaatctccgcagcagaacttcggaaatggatgaagctgtggggaaagcagcccattgtgcctgccaattcttacaatccctccatgataatgcccgctcaggatcagatctgccccccagtcaaaataggtatctccatatttgggactgtgagccagaagaatattcagggaatcggaagatggttctccgatcagttccctgatttcctctcttttaagctgtggagaaaatggcttcttataataaatcagaggtacttccagaccatagacagtaaggctggtttttcccacctgcaggctgcaggattcattatgcaggatatggatcccggctgtcttcagctccttttcatattcctgatatcgggctgccatacagttttcctgaggatctgtcctgtacagcttatattcatggtttcccaatgcataataaacaggatactgctgagccaggctcctcagaagagatgatgcagtctttaaagaagcagaatcatttctcacgaccatatcaccggcaatgagaatcccatccggtctgtaccggtggatcgtctccagaagctttctgttatcagggccaaattccatgccatgaagatctgcgatcacagcaaatctgatgcctctcgcatcctttattttgttagaatggattgtataatgtacggttttaaatcttttcatgcaagttttcttttccctttatgttcactttgtgtctgacaacgcattctgcgggatattattttccaaatccgcagttcgggaatgtacagacatcacagttcaggcagagtccaccctctccaagttggttaatctctgataatgtgatctcatcatctgccatcagtctcggcagaagcagatcaaagatggtattctttgcatacataacacatcccggaagcccaaggatcggtatctgcctgccgtctttctcataataggaaaccaacatcatagctcccggaagtacgggtgcaccgtaggatacgatgcgggttcctgttgctttgatcgcacccggagttctgtcatccggatctacgctcattccaccgctgcagactaccatatcggctccctcttcgataaatttcaggatatcggctgttatctgttccatatcatcacccggttttgtctgaccgatgacctctgatggaaattttgcaaatttatctctcagtacaggagtgaaggtatcagtgatcagacctttctgcacttcacttcctgttgttacgatacccacctttttcttcttatatggcagaatggaaaagatcggctctgtgcctgccacctctgctgcacgatccattttctccttctcgatcaccagagggataattctggttcctgcaagtttgtcgcccttctttacaggaaaatctccatggcgggatgcgatcatcatctctccaagtgagttgacagccagcaaagcttctctgcggatcttaagcactccgtcaatgtctgcgatcagctcgatctttccctcttttatatcagaaccatgcatggtgtccgaatctccggcacagatcttataaaggatctctgcaccttcattctcatgaaggattccttctttcttctcccacacatataaatgttcttttcctacagagagtaacagaggaatatcctcttctctgacaatatgacctttcttaaaaagcacccctttttttacatctttgataatctgtgtgatgtcatggcataaaatgtgccctacggcatcttctgtacggatttctttcattatatagtaccttccttttgttttttatttccctcaatacccatttagattttattatacatcggattgctgtcctttgtcaaaaaattatagaattgtccaaaatactttttgtttacaggttactgttcactctgttctcagtaacgtttacaatctcatgaagacttttttcaggcagtccggatatgtggcttttcctgcattttccccataaaggatcctcactcttcccagttccttcccatcgacggaatagatcatctcccctgccagggtgttctttttcaccggggcctttacttccctgtggattctcagctttctttttacattcccgatattctgtcctgtggtatccagatagtggaactgttcttcataaaccagggaaaccgtctttttctttccatttctgaccgggatctcaggcagagcttccattttcttatctatgtacaggctgcattttgaaaagccataatttaacatggaggctgcatctttaaatcgcactttatagtccgaggctgccatcactactgcgatcagagcaatgtcatttcttttggcgactgcgctgaggcagtattttgcaatgctggtgcttcctgttttcaggccgacacagccctcatagctgcggatcagtttgttggtattggtaagtccgaattccttggtcccctgcctggtcacatgggtgatattttccatccatatggaagaatattccagaatcttcggatattttgtgatcagttccctactcatgatggcaatgtccctggctgttgtgtaatgatcgggagattctgtcagaccacagcagtcttcaaaatgagtatttttcatcccaagtccttctgcccgttcattcatgtggcgaacaaattcctgttcactgccgcagatatgctctgccattgctacgctggcatcgtttcctgacgcgattacaatgcatttgatcagggtttccactgtctggatttccccctcctccagaaacacctgagagccgcccattgactttgcatgtgcactggttgtgactgtgtcgtccattttcaggctgcctttatccagagcatcaaagatcaggatcagagtcatgatctttgtgatacttgcagggcttcgtctggtatccgcatccttctgataaacgactgttcctgtctgcgcttccattaagattcctgagggtgcttcaataagatctgtggattctgcctgtttggtattgctttcctcgggcaaaaagattccggcggcataagcaggggtaatgatagtgcagaccatgatgatcacagcgcatattatggagatccatttttttcgcatattatctctccgatcaatgtaccggcaggctgccggcgcacgctctaagactactttctttattcattatatagcaatccaataaaataatgcatcttaatccgatccgatacctgatcatgatcagataaaaagttactgttcactccgttctcagtaacacgcttcgcgatgcacagaatttatgctaatcgcataaattcgcgcggtatatctcgggttttctgtgaccttcgctcacaaaaaacacctcgcgggatattaccagtgaacagtaacgataaaaagcactgaaaaccataaaaatacgattttcagtgctcattttacatcagcggcgcaaatgcgcggaaaatattctgcatgatacgcagccctatatttctgttcaggcagaattccggttctatctgcctgcaatattccatagtctggataaaatcatctttgatatcctgtattactctgtttctgtagatccatacaccatcctcaaaatgaagataaagacttcgatagtccaggttgatggttcccacaactccaatctcatcatcactcacaaaggattttgcgtgaaggaaaccgggctgatattcataaatctttacaccggcttccagaagctgcctgtaataggactgggtaagaataaataccagcttcttgtcagggattcccggcgtcataatacgcacatccaccccgcttttggctgccagacagagggctgtcatcatctcattgtctatgatcagataaggagtacagatatatacatatttttttgctttgttgatgatgttcagatatacatcttcaccgacaacctcttcatccagaggtgtatcacagaacggctggacaaatccgtcactctcaaattcttccccatgatatctgtggggaaaataggcttcataatcaatactttcttcagatctgccgatcaccgcccacatatggagaaacattaccgtcatattccagacagcttctcccttgagcataaccgccgtgtccttccagtgtccgaaacgctctttctggttgatatattcatctgcaagattgatgcctcccgtaaatccaacccatccgtcgatgatacaaagcttcctgtgatcccggttattctggataatgttcagaatgggacggaaaggattaaatacctgacatttgattccttttttctgaagctcttcataatatttatggggaagtgttgtaagacagccaaatccgtcatagatcaggcgcacatccacaccctccgcagctttcttttccagaatattcaggattgtctgccacatcaccccatcattgataatgaaatattcaataaaaatatatttcttcgcctgtttcagttccctcacaagcaccgggaacatatcgtctcctacctgaaaatactctgcagttgtgttctcatggaccggaaatctggaaacatccgaaatatatctggactggttcgaagccgaggaatccagttcttccagcttctgcctcgtctgtgaccgatcccgcagatactccctgctctcctcaatcctctgttcaaaatgctgctgcatgatcgcagcaatcctggaacgcccaaatacaaaatataataccactccaagaattggcaggatcaggatcagcatggtccaggccagtttataggaaggatttatttccttattcaaaatccataataccagcacaatacctatcagcctcaatccgatatcaatatatctggaataagcggccagacgcagtaccatcattaagatccatccgagctggacaagcattgcaaccgcaacataaaagattctgttgaaaatcagctttgccagttttttaaacagtaaaaggatccagtttttcttttctttaagtattttgttattttctgccttcaagattacttctttcccctgattattgtccaaattatgataaaaatccctgacagaactgccagggatttttgcgcacaattaattatatttacgttttcttgcggcttcagatttctttttacgacgaacgcttggtttctcgtaatgctctcttttgcggatttcctgctggattcctgcttttgcacagcttctcttgaatctgcgaagagcgctatctaaagtctcgttctcttttacgattacgtttgacatagactcacacctaacctccctccagttgtagattgtgctaaaatacaactgtctgggtattttttcttgcacaagtgatattatatatcattgcctgtgggttcgtcaacatctttttggttaaattttgcagatttttttagttactattcacacgccactatcccgcgaggtgttttggcatgtatatgccaaagtcccgagacataccgcgcgaatttatgcgattagcataaattctgtgcatcgcgaagcgtgttgctggtcacaaagtgagcagtaacaatttttactttatctgaccttcaaggattcctgctgctgcatctacggcttcctgagctttggcagggttctttccgccggcctgagccatgttcggacgtccgccgccgccaccgcctacgatagctgccactgctttgatcaggttacctgcgtgagcgcctgctttctgtgctgcatcagtagccattgcaagaaggtttactttctcaccgtttactgctgccagaaggacaacaccttcaccaagtttgcctttcagctggtcgccaaggtcacgaagtccgttcatatccactccgtctacttttgcagcaagaagtttcacacctttgacttctactactttatccataacatctcccagagctccctgagccagtttgctctttaaggattcgttctcgctggaaagtgcctttacttctccctgaagatgtccgatcttctctacgatctctgcaggatttgctttcagggcttttgcagcttcatgaagcagttcttcctgtttcttatagtattccagaactccgtttcctgtcagagcttcaatacggcgcacacctgctgcaataccggattcggaaacaattttgaacagcatgatgttgcctgtgtttgccacatgagtaccaccgcagagttccttggagaagtcgcccatggataccacacgtaccttctggtcatatttctctccgaacagagccattgctccggatttcttagcctcttccacatccataacatctgtacggacttcaagaccagcctggatttctttattaacaagagcttctacctgtgcgatctcatcagctgtcatagcctggaaatgagcaaagtcgaaacgaagtctgtccggtgttaccagagaacccttctgttctacatgacttccaagaactgtctttaatgctttctgaagaagatgtgttgcactgtggttcttctctgtatctcttcttgcagcttcgtccactttcagggaaactgtttcgcctgtggagatcataccggattccatatgacctacatgtccgaatttaccgccgcgaagcttgatggtgtcttctactacgaacttaccgtttgcagtttcgatcacacctgtatctccgacctgtccacccatagttgcatagaatggagtctgctctgtaaagacagttcctttctgtccttccatcagggagtttacgatctctgtctctgttgtaaggactgttactttggaatcaaaggtaagatgatcgtatcctacgaattctgttgtaacatttacatcgatatcatcatatacagttgcgtcagcacccatatagtttgtcacttcacgtgcagaacgtgctttgtttctctgcttttccatacatttctggaagccagcttcatcgatatcatatcctttttcctcaaggatctcttttgtaagatccatcgggaatccgtaagtatcatataatttgaatgcattttcgccggaaagtgttttctctcctgctgctttcatctcatcttccatttctccaaggatacgaagaccctggtcaatggtcttgttaaactggttttcttcatttgtgagaactttaaagataaattctttcttctcttccagctccggatatcctgctttggaaccattgatcacttcttcacttaattttgcaaggaaggggccttcgattccaagaagacgtccgtgacgtgctgcacgacggatcagacggcggagtacataaccgcggccttcgtttgtaggcatgataccgtcggagatcataaatgttgcagaacggatatggtctgtgatcagacggatggatacgtcatcattataattcttctcgtattcttttccggagatcttacataccaggttacgcagtgcgcagatagtatctacatcgaagatggaatctacgtcctgcacaacaactgccagacgttccagacccatacctgtatcaatgttcttctgtttcagtgttgtataatttccatttccatcgttctcaaactgggtaaatacgttgttccatacttccatgtaacggtcgcagtcacagcctactgtacagccaggtttaccgcagccgtacttctctccacggtcatagtagatttctgaacatggaccacaggggcctgcgccatgctcccagaagttatcttcttttccaaaacggaaaattctgtcagccgggattccaatttctttgttccagatgtcaaatgcttcatcatcttccagatatacggaaggatacagacggtttgcatccagtcctactacctctgtgaggaattcccaggaccagtgaatggcttctgtcttgaaatagtcaccaaaggagaagttaccaagcatctcaaagaatgtaccatggcgtgcagttttacctacgttctcgatatcacctgtacggatacatttctggcaggtacttactcttgttctcggcgggatctcagcacctgtaaaatatggtttcagcggagccatacctgcgttgatcagcagaagactcttatctccctgtggtaccagggaaaagcttttcattaccagatggcctttgctttccatgaagtccaggaacatctgacgaagttcgtttactccgtatttcttcataatcttttcctcctgaaatcgacggtaccggttcagcagtatccgccgatatttctataatgaattttttattttgccagaactttattgaatttctttttgccttttttcagcactacaccttcacctgtaagtgcatctttggcaactgtgtatttcacatctgtgatcttctcaccgtcaatggaaacaccgccctgctcaatggcacgacgtccctcggaacgtgttggaaccattcctgcttttacaagcatggagatcaggtcgattgttccttcctctgagaagtcttcgtctgcaagctcagttgtcggcatgtgtgctgtatcagcgccgcctgcaaaaagtgctcttgcgccttcctgcgctttctttgcttcctcttcgccatgaaccagatttgtcagctcgtatgcaaggatttcttttgctttattcaactggcttccttcccatttcgccatctcatcgatttcttctaacggaaggaaggtaaggagacgcatacatttgataacatctgcatcatccacgtttctccagtactgatagaaatcgaaaggagaagtcttctccgggtcaagccatacagcaccggactgtgttttacccatcttcttaccttcggagttcagaagaagtgtgatcgtcatggcataagcgtcttttccaagtttacgacggatcagctctgtaccgccaagcatatttgcccactggtcatcaccgccgaactgcatggtgcagccgtatttctgatacagcatgtagaagtcgtagctctgcatgatcatatagttgaactcaaggaatgtaagtccacgttccatacgctgtttgtagcactcgtgagagagcatacggtttacagagaaatgtggtccaacatcacgaagtacttctacataatttaaattcatcagccagtctgcattgtttaccattaatgccttgccgtctgagaaatcaatgaaacgttccatctgtttcttgaagcagtcgatgttgtgctgaatggtctccactgtcatcatctgacgcatatcagatcttccggacgggtcaccgatcataccggttccgccgcctaataatgcgattggtttatttcccgccatctgcagacgtttcatcaggcagagcgccatgaaatgtcctacgtgaaggctgtctgcggtagggtcaaagccaatgtaaaatgtggcttttccattatttaccatttctttgatctcttcttcgtctgttacctgggcaatcaaaccacgggctttcagctcgtcccaaactgtcattgtttgtttcctcctcgtaataaaataaaacaacccggttcctgtccatttaggacgagaaccgggtcccgcgataccacctaaattcgcagaaaactcgcattctctgcctcaataagtaacaaaccatgccattgttatgataaacaacggttctctctgttacttaagcatgttaacggatgccactccgctgcagtctacttaccttacaatatctctgaggtgttcggtgcagagctccgggaggtattcacataagttccccacgcgcctctcacctaccggcagctctctgtctgttttccctatgttactctttcccatctgtgcttttttatatcatatatctgcaagtatacaaatacaaaatttatttgtcaaggaatttataacaatcctcttcatatttcaccaacttaaagcattaatgtactcaccctgaaatccagtccacaaagaatacatgtcctttgtactgttcatattccagcttgctgaaattaaggttctgtgccttaaatgctgccggagtcataaagaatttgtaattgaaatcctttgtcttaaatcccgggagtgttctctttgtgccatgattcacatagttactgaacacttccatggctgcctttgctgccgcataggcattggtcctgtcctcaaactggcctttcagtcttttaagaagtgctccatctgtgacaaccgcatactgggtaggttttccctgatataccacataacggatctgtgacggaaattctttatactggtcaatggtacagtttaatacgcaaagcgcaactgcctccattcccacgactccctgatctcctgcttctgcatcacacactgctgccagaagatccagatctgacacctttccgtctgcaattcccggatgttccaggaactcttcttccatatagtagtatttattattcttcgcatcaaagaccttgacatatttgccctctactgtgtaatcattaccggaagtctttgttgcagcaccgtcagaatcaaacctgtatgtagttccgtcaatggaagcgatggtatttgccagcatcactcctgatgtatcaaaataatatttctttccatcaagctcaagccagcctgtcttcgccttaccatctgaagggttgaaataatatttcttacttcctacggttccgaaacctttctgataacggacaccggttgattttgaaaaatagtaatagtctgagtcaattttctccagacctgtatacattattccatttgacggcttaaagtatctgtaatttccggcactgctcttcacccagcctgtacacatacgtccattggcctgactgaaatagcgtttctgttcttttttgttctccacccagcctttggccataacgccggaaccgctgtaaaaataatatttatactcatctgtatctgtgagccagcctcttgtcatcaggcctgttgtctcatcaaaatggcgggtatttccattggaatcagtgataaatcctgtcaccatatatccggctccgctggtaaagtatcggatcgcctgtccgctggagtcttttacccagccttttacctgaactcctgttttcttatcaaagtaatatttcttacccttaagttccagccagcctttctgtttggaaccatctttgtttatgtaataggttttccctttctgagtgacaaatcctgtttttgttgccgcggatacactaaaacagcccattacaaaaacggtcatcacaaaaaggagcagatactttaacaatagtttcccatgtttcttcattcttattctccgtttcctctctttttatacgtattgttttacgttttaattgggttattgttgcatttctttctcaatcattacagatttgttacgtggtatattatatcgaattcatatattattgtcaacttgtgaaaagcaacaattcgcatcgaacttaaggttattggttattggttactgtgaacataatgaacaatgatgaaactgtaacactttttgcggttccacatatgataggattgtaaagaaaaaaaacggaggatttaatatgagcgacttagctgctacaaattgcggatgtgaggacagaggaggatgcggatgtggctgcgctaataacagcggatgcggatgcgacaatggctgcggatgtaataacggatgtggatgtaacagtggatggggactttcaggcggaaataattcctgctgtaatatcctctggatcatcatccttctgtgcctgtgcggaaacaataactgcggatgcagcaatggctgcggcggatgtggcaacggtgacaactgctggattattatcgtgctgcttctgttatgcggaaacaatggctgtggatgtggctgctgacaatcattttctgttggcagggggagctttccctctgcctctttatattttacaggattataacttcgtccttattattcatgctgcctgatattatccttatctttcatattccgggaattgatcctgtctgttttcttttccgggtgcactgtctgagcacattgttttttctttttcacacactccagatctatctcataaaaagcatttccatttataataagcatttctttcttttcttctgactctgatcccatatctgattctccatttttttgcaactgcaaacgcatgatacctgcagcaattccataaaatttgaggcagcgtgcagtaaagcagtctcacagttacttaaattctactttattatatgtcagaatccttctccccgtcatattctgttaataaaaaacataaaatggaagcagatattatgaatgaagagcagatttcccagactttgttggatcagatggtcagttctgaccgcggacagatgataaaagccgccattccttatcttccgccaaaaggacagcagattttctcagtctatgaaaaagcggttgaatttatcaatacggtttctgttttcagcaaaagaagttccggcagcgatctgtgtgccatgagcatgccgccccagaatccggtggatatcatcaatgatatccgcagcttctgttatggtcccagcagggataaattagatcagatggtaaatatgatggctatggttcagatgctgcagctcatgaaccagcctgcagatggtgagaaggaggattcccatgaatgatgactggcgcaacaacccgaagcttgcaggtatggatcgttccaagcttgatatgcttcagaatctggcttcccagggaagttcaaagggtgcaaatgagatgctgcctttcctgatgaacgcagctgctcagggaaaaaaaggtggtctgaaatttaatgctgatgaaatttctgcgatcattgaagtgctgaagatgggaaaatctcccgcagaggcacaaaaacttgataaagtggtgaaccttatgaaaatgatgcggtgaccaagtccccactcactgcttattgcttttcgcagactccgcagaaaacttacctgattcggttaatatgaattgctatgataacaaaaagagtacatttcatcaactttccgaaatgtactcttatgttcagtaatgtaacttgtcaccaattattatctgtcatattttcgcagcctgtcgcagataaatgtcagtgcctggtcaactgcctggtctctgatactttttctgtcgccctcaaagtgaaattccctcacagttgtctttcctgcacagtaacatcccataaatacggttcccaccggtgtttcctctgttccaccgcccggacctgcaagtcctgtcacagagagacagacatcggttttggctgctttcgcaccgccttttgccatctgtccggcacatttggctgagacagcaccttctttcttcagtgtactcttctttactccaagacattttcttttggcgcggtttgtatatgtgacataaccacacataaatacctccgaagctcccggtacatttacgatgtccgctgctaccgcaccgcctgtacaggactcggcaagagacagtgtcattttcttttttttcaggagtcctacaactgtttcttctaatgctgattcttctgatgcttccttttctgaagccatatttaaagccttctttctaatcctgcatggacagaacactcctgttctgccagatatatgtgatcagggaaataacggtaagtgccagagaaagccagataaatatctgttccagaatatcaaacactccgcccagatcgatcagcagtaaaatgatcatgatcatctgggaaaccgtcttgaatttgccccagtagtttgccgcgatcacaataccgttctcggctgcgatcagacggaatccgctgataataaattctcttcctataataatgataacaaaccatgccggaagtttttccagttcaataaaacagatcattgcagaacacacaagcagcttgtctgcaagaggatccatgaattttccaaagtttgtcaccagattgtatttcctggcaagctttccgtcaaaccagtcggtcacacttgcaacaacaaaaatagcaagtgctatatagcggtttgcctcaccgcccaggtctgtaagcataaacagtacaagaaacggaaccaggatcattctggctactgtaagtttattcggtgtattcatctgccaactctcctatcaaatcatattccagtgcaccggtcacacgtacctttgcaaaatctcctgtcatcaggagttctcctgtctgcacaaaaatataaccgtcgacctttggtgcatctccgtaagttctgccaatgtatgcgctctcatctgcaacttttccctcgatcatcacgagaagttcctgtccgatacggtcagttcccttatcataggaaatctcctgctgaagctccatgatctcgtcacgtctggcctctttgacttcttccgcaacctgatcaggcatcgttgctgcaggtgtatcttcttccggtgagtaagtaaatactcccagacggtcaaattccatctcatccacaaagcccatcagctcttcgtggtcttcctgtgtttccccggggaatccggagatcagagtggtacggagcacgatgtcaggaatctcccgacgaagcttatttacaatctccaccagctctgcctgtgttgtccttcttcccattctctttaagatacggtcacttgcatgctggattggaagatccagataatggcagatcttcttctcctctttcatggtctggatcagttcatcgtaaatttcctccggatagcagtaaagcacgcggatccagcggattcctttgatcttgcataactctttcaggaggatatgaagagatttctttccatatatgtcagttccatatacggttgtctcctgtgcgacaaggatcagctcttttacgccttcctctgccatctcctttgcctgtgttaccagacgttccatcggaacgcttcggaatttaccgcgaagtttcgggatgatacagtaggtgcagtgtttatcacagccttctgctatcttgaggtatccgaaatgtccgcctgttgtgagaacacgtttgccaagcttttccggaagataatcaatatctttaaattcctggaaatgttttccttccattgcttcacggattgccttaaggatgtctccgtaggaagttgtgccaagtactgcatctacttccggtacttcctcaatgatctcattcttataacgctgtgccatacatcctgtgacaaccaggactttacagctcccggttttcttgtattctgccatctcaaggatggtgttgacgctctcttcctttgcgtcattgataaagcagcaggtgttcaccacaatggcctctgcttcagtttcatcatctacgatctcgaacccgttacctgtaagaagcccaagcatttcttcggaatctacaaggttcttgtcacagcctaatgatacgaataataatttcataaattctcctataagaatgtgcctgaaaatatacctctgtaattctcagacacatccttttgtttatctattgtgttaccatcagttcttactcttcagttgtttcttctgctgtttcagcagtctctgtgatttcagaagcctgtgctgattcttctgtctgtgcctcagctgtctgttctgttccttcttcatcctcttcttccggagcaaggatctttacttttcctttgtagagctcgtcgatcgcaactgagagaggtttcttgccttccgcaccctctaccattggtttggaacctgcaatgatctggcgtgcacgtttgcttgcagcaagtacaagggaataacggctgttaagggacattgttgtatcgtcgtcctcactgtttgtattgattgcttcgattaattctgtataagacggatgtatcatgtattttctcctttcttttaagcggtctgggccgcatgtttatcatttctgaaatgcttttgtctgtttctggatatctgcgataaattctgcatttctggatactctggaatgttcactcacaataatctgatgaagatggtctacgcattcctctacagtatcgttgacaagaatatagtcatattgtcccataccttctgcctcttcactggctcttgcaagtctgtctgcgatcacctgtgcggtttctgttcctctgcctgtgagacggcgttccagttcctccacagtcggcggagttacaaacaccagaagtgcttccggtattttctctttgatcttcattgcgccctggatttcgatctcaaggattacatttctgcctgcctgaagctgctcttctacataagagcgtggggtaccgtaataattttccacataccgggcatattcaagcaatgcatcctcttcgatcagcttctcaaattcatcccttgtacggaagaaatattctctgccgtcctcttcaccgggacggggttttctggttgttgcggagacagataatgcataatcatcatatttctccatgaggcgtttcattactgtgccttttcctgcaccggaaaatccggaaaccactactaaaattcctttattcatgggtctctcccttatcctcgttttcatatatttctgcaaatctccgggcaatggtctcaggctgaagtgcgctgagcaccagataatcgtcgcttgtgacgatcactgcttttgtctttcgcccctgagttgcatcaatcagtgaccgggttccctttatgctctgcaccattcgttttacaggtgccgcatccgggcttaccactgccacgattttctgtgaattgactacatttccaaaaccgatattaataagtcttgccacgttttcttcctctattctacgttctggatctgttctctgactttctcgatctctgttttcagatcaatggcaatgttggagatctccagatcacttgatttggataaaatcgtgtttgcttctctgttcatttcctgtgccatgaagtccagtttgcgtccgatgccttctttctctgttgtgagcatctttttcatgttcctgatgtggctgtgaaggcggacggtttcctcatcattgcagattttgtctgaaaacaggatgacttctgctgcgatgcggttgtcgtcgatctgtgtgtcttccagcagctcggaaacttttgcttccagtttggtcctgtaggcattgactacttccggagagcgggcttctacacgtaatactttttcttcaaggctgtccagttttccgataaggtctttctcaagatttctgccttccagtatccttgtctggacaaatttctcacatgcctcgcgaaggggcggttccagagattcccagagtgcttcctcatcaacagactgttcttccatgacaagtacctccggatagcgtgacagggtgctgactttgatatcgtagtcaaggtcaaagtcctgctgcatctgtttaagacaggtgatgtattcggatgcgagttctctgttgtatttgagagctccgttgtccagggtgtagtcttcgtatgtgatgtatacatcaactttgcctctctggatgtaggttttcatcaggtttctgactgcgccttccaggaaattgagttttctgggcattttgatgctgaggtccaggtatctgtggttgacagattttagttcgattgttatttttctttctttggtcacgacttctgcccggccgaaacctgtcatgctttttatcatagtttttctctctttgtctgtctattagtgtcggggtatgtgtgcctgttctggtttacatacagatttattatagttcattatagaatgggagtcaaacattttttcgttgatggcggtaggaaatgtgtggtatacttacaagagggacgccgcaggtgggacgcaggtaggacgcaggagaaaataaatagttccgggcgcggtttcggggtttagtcaactctaaggcttcggaaatctgctaaaggcatgaaaaaaacagcaaaactcgctttgctcagacaggttgctgtttttttcataacgcagattcccgaagcctaagagttactacaacccctgcaaatgcgcccggaactatttattttctcctgctggtgactggctgtgggaggtatatggtatatttagttggaaggctttcagagagacctgttatattagagtttgtttgtcagaaagggcttcgcctttctgacgtaggtgatgtttagattttatgtattacctgtcaattataaaattgttatcagtcatattggggactgagattttgattattgtgagtattatttaaaaaggagtgtttttatatggcttttgatgggattacgattgcggctatggtgaaggagctgcatttgaatttggatggaggacggtttaataagattgctcagccggaggcggatgagcttttgattacggggaagggggcgaatgggcagtgcaggctgctgctttcggctagtgcttctcttccgctgatttattttacttccaagaataagcccagtcctatgactgcgcctaatttctgtatgctgctgcgtaagcatattggaagtgcgagggtttcggatatcaggcagccggggatggagcgtgtggtgatgtttgagctggagcatctgaatgagctgggagatccctgtaagaaggttcttatcatggagctgatgggcaagcacagtaatattattttctgtgatgataaagggatgatcctggatagtatcaagcatgtttcttctcatatgagttctgtgcgtgaggtgcttccgggaagggagtattttattccgaagacgcaggataagctggatccgctgactgtgagtgaggaggaattctatgatgttgtgtgcaggaagccatgtaatgtttccagggctgtttactcttctcttactggaatcagtccggttgttgcggaggagatctgtttcagggcttcgatcgacggaagtgatgcagcgcagtctctggatgaggcggcgagggtgcatttgtatcatacgttccgcaggctgatggatcaggttgtggagggggatttttctccgaatattgtttaccggggggaagaacctgtggagtatggtgtgtttgcgttccagcagtatggaccggagtatcattctgtggagtttgacagtgtttcacagatgctggagacttattatgcgacgaagaatacgctgacgcgtatccatcagaagtcttcggatctgaggaggatcgtgcagactgcgctggagcgtaaccgtaagaagctgagtctgcaggagaagcagatgaaggatactgcgaagaaagagaagtataaggtttacggggagctgatcaatacttacgggtatgggctggaggatggatgtaagtcgtttaaggctctgaattattataccaatgaggagattaccattcctcttgatcctactatgactccggcggagaattccaagaagtattttgacaagtatggaaagctgaagcgtacggaggaggctctgactgagcagattgcagatacgagaagtgagattgagcatctggagtctgtttccaatgctctggatattgctctggctgagagtgatctggcacagatcaaggaagagctgatggagtatgggtatattaagaagcattatgaccgcaggaaggggcagaaggcgcagagtaagtctaagccgttccattatgtgactgaggatgggtatgatatttatgtgggaaaaaataatttccagaatgatgagcttacctttaagtttgccacagggaatgactggtggtttcatgccaagaagatggccggttcgcatgtggtcgtgaagtctaaggacggagaactgccggatcatatctttgagattgcgggacagcttgccgcttattattccaaaggacgtactgcccctaaggtggagattgattatatccagaagaagcaggtgaaaaaacctgcaggggcgaagcccggatttgtggtttattatacaaattattcgctgatggctgagccgtcattaaaaggagtcagggaagtctgatcatactgttgtatagttacaaatattaaaagaattgcgggagctgctttgcagcggagtaagtaattcgtggatgtcaggtcagaggtgaaataccttttgaccctgacattatataacaataattaaggagaatttctttttatgagtattttgaatgttgaacatctgacacatggtttcggagacagggcaatttttaatgatgtgtctttccgcctgttaaagggcgagcatattggactggttggtgccaacggggaaggtaaatctactttctttaatattgtaaccggaaagctgatgccggatgagggtaagattgaatgggcaaagaatgtacgtgtcggctatctggaccagcattctgtcctttctcagggtatgtccatccgtgacgtgctgaagtctgcgttctcttatctctttgagatggaggaaagaatgaatgggatctgtgactctcttggcactgcttctcctgaggagatggatactctgatggaggagctgggaactattcaggatacccttaccatgcatgatttctatgtgatcgatgcgaaggtggaggaagttgccagagccctgggacttctggatatcggactggaacgtgatgttacagatctgagtggtggtcagagaaccaaggttctgcttggcaagctgcttctggagaagccggatatcctgcttctggacgagcctaccaactatctggatgaggaacatatcgaatggctgaagcgttatctgcaggattatgagaatgcatttattcttatctcccacgatattccgtttctgaattctgttatcaatctggtttatcatatggagaatcaggaactgaaccgttatgtcggggattatgaccatttccaggaagtgtatgaggtgaagaaggctcagcttgaggctgcttacagacgccagcagcaggaaatcagtgaactgaaggatttcgtcgcaagaaataaggccagagtttctacaagaaatatggcaatgtccagacagaagaagctggataagatggatgtgatcgagcttgctgccgagaagccgaagcctgagtttcattttaaatacggacgcactccggggaaatatattttcgagacgaaggatctggttattggttataatgaacctctttccagacctgttactctctctatggaaagaggaaataagattgcgctggttggtgcaaacggtatcggtaagacaactttactgaagagtattctggggttgatcccgtctctgaagggttcctgcgaactcggggagaatcttcagattggatattttgagcaggaagtaaagggtgataacaagactacctgtattgatgagatctgggcggagtttccgtcttatactcagtatgaggtgcggtctgctctcgccaaatgcggtctgactaccaagcatattgaaagtcaggtacgtgtactgagtggcggggaacaggcgaaggtgcgtctgtgtaagctggtgaataaagaaacgaacattctgcttctggacgagcctaccaatcatctggatgtggatgcaaaagaagctttgaaacaggcattgatcgaatataagggaagcattctcctgatctgccatgaaccagagttttaccgcgatgtggtttctcaggtatgggactgcagtaaatggactacaaaagtattataataattagtatatgaagggttattacaaatgagtaaagcaaaaactgtggatctgacttccggtccgatcctgaaaactctggcagagctggctctgcctatcatgatttcttccatgctgggaacagcatacagtattatggatatggcatggatcggactgcttggtgcaaaggcggttgcaggcgtgggagtaggcggaatgtatgtctggctctcccaggggcttgcatccctgtcaagaatgggcggacaggtaaatacagctcaggcatgcgggcgcaaagattatgaccaggcacgttcctatgctgccggttctctgcagctcactgcactgtccggcattttgtttgctgctgtctgtgttattttcatacagcctctgctgggattttttaatctgaccgacgcagaaacttatactgctgccaaatcttatacattgatcacctgtggactgattcttttttcttatctgaatctgacgctgacaggactctctactgcgcagggagattcccgcactcccctgcttgcaaactttatcgggcttgcaggaaatatgattctggatccgctgctgatccttggcatcggacctttcccgaggctggaggttgccggagccgctattgcgacagtaagttcacagattctggtttttgtagtgatggttctgcgtatccggcattccagactggagccaaatgttttacagcatctgaatctgctgtctgtttttccaaaagaatattataagcacattttcaggatcgggtttcccacagctatacagggaagcatttactgtttcatctccatgattctgacccgtatggtttctggttatggtgctgccgctattgcaacgcagcgtgttggcggacagattgaatccgtatcctggaatactgctgatggttttgcttcagcactgaatgcttttattgcccaaaactacggtgcacgaaaaaaagaccgtatccgtaaaggttacagtctgtcatttcgcgttctcacaatttggggcctgtttgtcactgcagcttttgtctttcttccggaaccaattgccaggttatttttccacgaaaaagaagctctggatactgctgtcaattatctggtcattatcggattcagtgaagtctttatgtccattgagctgatgacagtgggcgcattatcaggacttggacgcaccagattatccagtacgatcagtgtgatcctgacaggctcacgaatcccgctggcattgatcctgacacatgcgggaatgggattaaatggtgtatggtgggcgcttacaatctcttctatcgtgaagggaatcgtgtttacactgacattccggcatatcagcaggcggttgcctgaaaaggtctaaaggtctcttaatatagctgtcaaactcaaaagaggactgttcagaaaaatttctgtcagtcctctttttactgtttctattatttcgcaacaaagtttacgatcttgttcggtacataaatctctttgataaggttcttaccttccaggaaggaagcaattctctcgtctgctttggcgatctcgaatgctttttctttttcacatccgttagggattacgattgttcctcttactttaccgtttacctgtacaccgatctcaacggtcttggcaattgttttgccttcatcgtatttcggccattcggaaactgccagtaagccttcacctccgatgaattcccagatttcttcgcagatatgcggtgcgaacgggctaagcagtttgataaaaatggtaaggtcatttttacttaagtgtccttctgctgtgatctcattaatgagtgtcatcaggctggcgatcgctgtattgaatttcaggttctcgatatcagaagaaactttcttgatggtacggtggagtttcatctccagttcatcagatacggattcttcagaaaggatatctgtcagccctgcaacacggtccaggaacttcttacagccctttacagagttctcgctccatggtgtagctgcgccatagtcacccataaacagtacataggtacgaagagtatctgcaccgtattcttctacaatatccagcgggtcaactacattacccttggatttactcattttatctccgtccggtccgaggatcaatccctggatggaacgttttgcgtatggttccggtgtatttactacgccaagatcatacaggaaatgatgccagaatctggagtagatcatatgtctggtaacatgctccataccaccattgtaccagtcaacaggcatccagtatttcagtttgtccatatcagccagtgcatttgcattgtgcggatctgtgtatcttaagaaataccaggaagatcctgcccactgaggcatggtatctgtctcacgtttcgctgcagcaccgcatttcgggcatgtgcagtttacaaaagaatcaatctttgcaagtggggactgtccgtcttcacccggctcgaagtcctttacatccggcagacgcagcggaagttcgttctccggaactgccacaacaccgcagttcgggcagtggataagcgggattggctcaccccagtatctctggcggttgaatgcccagtctttcatcttatactgaacaccggctttaccgattccttttttctccagttcttccaacatacgctcaatagaatctttcttctttgcatatccgttcaggaaatcggagtttaccatttcgccgtcgcctgtataggcttctttggaaatatctccgcctttgataacttcgataatgtcgatgccgaatttcttcgcgaaatcatagtcacgctggtcatgagcaggtactgccatgatagcacctgtaccatatcccatcattacatagtcagcaatgtagatcgggattttcttaccgttaaccgggttgattccctcaagtccctggattctcacacctgttttatcttttacaagctgagttctctcaaactctgttttctttgcacactcattacgatatgcagtgatctcatccatgtttgtgattttatctgcatatttgtcaatgatcggatgttccggtgcgattaccatgaatgttacaccaaacagagtatccggtctggttgtatagatttcaagtttctcatcgattccgtcaacatcgaagttaacgaaagcaccttttgatttgccgatccagtggatctgctgctgttttacattatccggataatctacatctttcagaccttccagaagcttatctgcatactgggtgatccttaaataccatacatctttggatttctgaacaacatcgctgtggcagatatcacatttaccgccctggctgtcttcattggaaaggactactttacagtgcgggcagtaattaaccagtgttctgtctctgaatacaagacctttttcgaacattttcaggaaaatccactgtgtccatttgtagtaatcttcatctgttgtatcgatcacacggttccagtcaaaggaaaatccaactttctttaactggtttgagaatctcttgatgttctcatctgtgatgatacgtggatgtgttccggtctttactgcgtagttctctgtcgggagaccaaatgcatcaaatccgatcgggaaaagtacattatagccttccatacgacgttttctggaaataacctccagactggaatatgctttgatatgtcctacgtgcataccggcaccgcttggatatgggaactctaccagaccatagaatttaggtttgtcactgttatctttggcttcgaagactttggcttcttcccattttgcctgccacttaggctcgatctttttaaacaagtatttcatctctatacttcctccaacattttgctatatctaaaaattcattttaattcaatggcgccggtttgtcaatgtaacgtttcgcagtattggctgtttttacgataaaaatgggacctattttatagttactaccagtgaacagtaaaaacaggacatctcacatttctgtcaaatgtcctgtcttctttatttcttatatacttacatctaattcatagcgctgatatatttatctgctgcctctctgtcggtaaccgccagcctcttattattcttcagatttatccactttgcttgctcttgcttcgatttcttttgcctggatatcgttcggagcctgctcgtagcgtgcgaattcataggagaattctccacttccacctgtcatagaacgaagatctgtggaatatccataaatctcaagctgtggaacatctgcctcaataatggtattgccctgatgatcaggagtcataccaagaacacggccacgacgtttgttcaggtcgcccataacatcaccggtaaatttatccggaacagttactttcatagatacaattggctctaagagtacaggtgatgcatccataaagcctttcttaaatgcaagaatcgttgccatcttgaatgccatttctgaggagtctaccggatgataagatccatcatataaggtagctttcacaccaactacaggatatgcagccagaggtccttttaatacgcattcctgaagacctttctcaactgccgggaagtagttcttcggaactgcaccaccaactacaacctgttcaaattcataaggtgtctccagatcgcctgatggctcgaaacgcatcttaacatgtccatactgtccatgtccaccggactgtttcttatgtttaccctctacatctgcattcttacggatcgtctcgcggaacggaaccttcggtttgctcagctcaacatctactttgtatcgttcttttaatttattcataacgatatcgagatgctgatcaccgataccatagataaggctctgacggtttgcactgtcatttactacacgaagtgtcttgtcttcactcatcatcttcgcaagtgcctgggaaatcttatcctcatcacccttcttcactgctttaaatctcttacaggtatatggtgtggaaaggagtgccttcggataaagaatcggatttgcttttgtcgcaaggctgtcaccagtctgtacgctgtttaatttggcaattgcaccaatatcaccggcatgaagttccggaacctcgatcggtttggatccttcaagtacatataatttattcagacgttcttcttcgcctttctctacgtttaataaagtgtcatcggatttgataacaccggagcatactttaataagagaatatttgccaaggaacgggtctgcaattgttttccacacatatgcggatttcactttcgtgaagtcgtagtttgcttcaaagatctcatttgtcttctgagcgattccgttgcaggagcgtttgtccgggcttgggaaatatccgcagatatcatccagtaagttggatacaccgcgaagattgatcggtgagcccatgcatacaggtacgatagatgcttcctgtacgttcattgcaagtgctgcggaaacctctgttactgagaatgtatcaccttcaaaataacggtccatgaattcctcgctggtctctgcaacagattccataaggatatcgtgatatttctccagatattcatccaggtattcaggaatcgggcattcctctttcttacctttatctatgtacttacgtcctgcctgttttacaacatttacatatcctacaaatttgccgtcttcacgaatcgggaagtgaagcggtgcgatcttcttgccgtagagttcagtgagctgttctactactttacggtagctgacatcatctacgtccatatctgtgacaaagatcattctcggaagtttatatttctcgcataagttccatgccttctgtgttccaacctgaacgcctgctttaccggaaactacaatgatcgctgcatctgctgcgcttactgcttcttctacttcgcctacgaaatcgaaatatccgggagtatccagcacattgatctttaccttatcccatggtaccgggatcaatgtggtagaaatggaaaaatgtctcttaatctcttctttgtcataatcgctgacagtatttccgtcttctactcttccgagacggttagtcattcctgctaagtaagccattgcttctgccagtgtagttttgccagcgcccccatgacctaaaaggactacatttctaattcggtcagttctaaatacatccatgttgcgtacctccctgtttgtctgttatgttattgccgcctgcaacgtccgcagcaacgatatggctatatattactaaatttttttatatttttcaagtattttatgaaattttaacatctttttttgtgaacttcttgtaaattgatgagcattttatatattttcagtaattttcacggatctcgactgtgaactttatcttaagtgtacagctactgactatagcaatcctcgtaaccagcgtgtgatagacagagaagataccttcatatgatacggcattcgctttgccgctttaaattatttatgtataaaagtgccgtatgaattgacttttcaaatcatatcctttaaaatagtaaattatgaaatcatgtaactgttccgtattttcacagttacgaataatgttacctgaaaggatgcaaaaaccactatgaaaactatcggttttatcggtctcggactgattggcggatcaattgccaaggccatccgaaaataccatgaagactaccgacttcttgcttatgatcaggatcgggaaacacttgctgcagcagtaagcagcaatatgatcgatgctgtatgcgaagaacatgatgaacgtttcaggagctgcgattatattttcctgtgtgctcctgtagagtttaatgtaaaatatcttgaatatttcaaagacaatatcggtcctgacacgatcctcacagatgttggaagtgtcaagggcattatccataaagaagtagaacgtcttggaatggaatcccgttttatcggaggtcatccaatggccggttctgagaagaccggattcgaagcttccagtgaccgtctgattgagaatgcttactatattattactccgggcggtgaagttgcactggaacgcctgacagatttcacagagatgatctcttcccttggtgcgatcccgatggtccttacaagtgaagaacacgatttcatcactgccggagtcagccatctacctcatattatcgcttctgcactggtaaatcttgtcaatatgctggacagcgatcaggaatatatgaaaacgattgcagccggaggtttccgtgatatcacacgtattgcttcttcttccccgattatgtgggagcagatctgtgtggaaaataatcagaatatctccaatgttctggatgactacatccgcctgctggttcagatcaaatgttttgtggataacaaggactccaggagtctgtatcagatgtttgcaagttccagggattaccgtgattctattgatgtggtagacaatggtctgctgaaaaaggcttatgtcctgtatcttgatattgcggatgaggccggcggtattgctacgattgccactatccttgcgatggagaagatcagcattaaaaatatcggtatcattcacaaccgtgaattcgaggagggtgtcctcaaaattgaattctacgacggaatctctatggaaaagggtgccgcactccttaaaaaaagaaattatattgtctacgagcgctagagcgtatctgaaaaatcattcccgcaatctgcacgccccactttgcaggatatttcacccgaattcagttgccgtagcccgctacggcgccctcatccgggcaaaatatcccacaaattgtgacgcacatcttgcagaaagcctttttcagacacgctctaaacagatcaccctttgacattcatttcaaaaatattttgtcaaaagcagattgctataaataactgcagggaaatacagaaatattataaaaacaggcaggaatcaaacatggaaataaaaaaacagacaaacctcagaggagaactcactgtacccggagataaatccatttctcatcgtgcagttatgttcggttctcttgcacagggtactacaaagatcacacattttcttgagggagctgactgtctctctactatctcctgtttccggaaaatgggaatcgatattgaaagaaatgcttccgaaatcctcgttcatggaaagggacttcacggactcagtgctccgtctgaaactctggatgtgggaaacagcgggactaccacaagactgatctccggaattctggcaggacagtcttttaccagcgaattaaacggtgacgcttccattcagtcccgtccaatgaaaaggattatgactcctcttctgtctatgggcgctgatatcgtaagtctgaggggcaatggatgcgcacctttgcgtattacaggaaagtctttgcatgccgctcattatcagtcaccggttgcttccgcacaggtaaaatcctgcgtgcttctggctggtatgtatgcagatgggatcaccagcgttactgagccggtactttccagaaatcatacagaaatcatgctgaattatttcggcgcaaatgtgacttcccagggaacaactgcttctattgaaccgcagcctgtactgaacggacgcgagattaaagttcccggagatatttcttctgctgcttactttatcgcagcagggcttcttactcccggaagtgagattcttcttaaaaatgtaggcattaatccaaccagagacggaatgcttcgtgtatgcaaggctatgggggctgatattactctgctgaatgcaagtacagagggtgagcctaccgctgacctgctgatccacacaagcagtcttcacggaaccactgttgagggtgagatcatccccacactgatcgatgaaatcccgatgatcgctgtaatggcagcttttgcagaggggactactgttatcagggacgcacaggagctgaaggtaaaagaatccgaccgtatcgcagtggtaacagaaggactgaaacgcatgggagctgatattcagccgactgatgacggaatgatcatccatggaggaaagccacttcatggtgccgagatcaattcttatcttgatcaccgtattgccatgtcctttgctgttgcaggtacaatttgtgacggtacacttactatcaaagatggggactgcgttaaaatttcctatccggaattctatgaaaatctgtactctctcggaaaatagcaactgtcatttataattatgctgctgtcaacatatcatttttttatgtttgttgacagcagcataatttttactgttcacctgtaatatcccgcaagatgtttttttatcctgcatatcttttgtctttctgtacatacttttcataacaaagcataatttgcaattcctatttacagtatcttcatactctctcagattgtatttttatagatacttgagaaattttatccaaaatagtcttttctttttccgataaatcggttataatgtgaatcgtcagaagattgttattattttaacattattcgatttgttttactatagcaggatttcaaactctgatggtctggattaagatgcattatttatgaggattgctataaacactgatattataattttcacggtgagtataccatacaggtatacagccagagaggagctaacatttatgaaaatcttattttacggcacaaaaaactacgacgaagaatttttcgagaagcttcttccttcctatccgggaattacaattaaatttaccgaagcaaatattcacgaagaaactgcttcccttgcaaaaggatatgaggcaatctgcgcttttgtaaacgctgatctgagcactcctgttatcgaagagctgaatgctcagggtgtaaaactgattcttatgcgctgcgcaggatataacaatgtagatctggaaactgctcacaaattcggaatgaaggttctgcgtgttccgggatattctccggaagctgtggctgagcatgcaatggcacttgcgctgacagcaaaccgccacacacataaagcatacatcaaatgccgcgaaaacaacttctctttaagtggtctgatgggacttaatttctatcagaaaactgccggaatcattggtaccggaaaaattggccaggcaatggcaaaaatctgcaaaggttttggtatgagagttatcgcttacgatcttttcccgaataagagcctggattatctggaatatgtatctctggatgagcttctggcaaccagtgatctcatcagtcttcactgcccgcttacagaagaaaccaaacacatcatcaatgaagaaactatcgccaaaatgaaagatggtgtaattcttgtaaacacttcccgcggcggcctgatcaagacagaggacctgatctccggaatccgtgatcataagttctttgcagtaggactggatgtttatgaagaagaaactgatttcgtattcgaggatatgtccgagcgtattctgcagagctccattacccagcgcctgctctccttcccgaatgtagtgatgacttctcatcagggattctttacaaaagaagcactgactaacattgccgagactactctcgaaaatgcgaaagcatttatggatgggaacgaactgaagaacgaggttctttcctgataattacagaaatatgatcagggggctgtcgcaataataattccagcgacagcccccttgtgattatttttcagttttagtttctgatttcgttgtatctgcagaatctgatgtttcagttttatccgcagatttttttgcagaagaatctgaagtttctgctttatctgtattttccgttttatctgtagtttctgttgcatctgtagtatctgtaatgtcagcggtctcttcctcaggctcatcaatctgtttcatatcctcgtcagaagtatctgcatccatttcattcagctcttcttctgtcagcggttcaagatcatcctgataaatttccttatttgtaatatcatcttctgacttcttcccacatccggcaagaccgatggatgccagaagcattcctgtaatcataaagtattttatttttttcattttaatcatcctttcgtctgttccacataacacaaatggtgtttcattttcagataatatttattctgctgttctcaatctgcctgccagatcttttatttcctgtatgatatcttctctgtctctgaccggcactttgtctgtacggtttacatatacagtccccagactgtcacagctcatctgacgaagcagcatctctgccgtactttccgctttttctctgggtccgatacttcctgctgtcagcagaactgctcctgttttcttcttaggaacaggttcttctttacggatatatcttgcactgaaataggtctgcagtctgctcatcacagcaagaagcattcccgtaacctcctcaaaatatacaggagatgccataataatatggtcacattcttcaatgtacgaaagaacctcctgccattcatctttgactgcgcatcctgcatggtcaaaacaccatctgcagtctatacacgggcggatatctgccctgtaggcattaaccaccttaaaatcccctccaagattttcctgcagagtccggatcatatatgcagtttcaccgttctttcgcggtgaaccgttgaatatcaatgttttcatctttatttttcctcatattctttcctgagaagttctatctcacgtacccatctctcattatctttgagtgctttcagagcatatttcatatgttttaggataacacatctcattctttgtctgtaatatttatgtaaccttttgtcatggtattataacaaaaatacggttttatgaaaagacttatttcttgacgattctgtgaattctctatatactttgaatatatcctatagcaattacgatttattttttgttaattctgatcatctgttcagatattttaactgcccggtctctttaatatttttttaatactatatctctaatctattataaacgaaagcgagaactatacatatgagcctacaatccaacaagcgaaaccagacgaaatcttcttctgcacgcaggaaagacatctacaaaaaatcaaaatactatcaggaaaaaaggcaaaaattgctgattgcaacaggtatcggtatctttgttctggtttttatacttattctggcaggtatccgcggatgcagcaactatatgagttccagacaggcagcagccaaaaaaactgtttccatgaacgcttctaaggacaacagccagaaagcatcctcagattctcagaacacggattcctccaatgctacagtatcttctcctgtttctctgacactcagtgttgtcggtgactgcactcttggcacagatgaaacttttgattatgataccagcttaaatgcttattatgaaaattacggtgcagattatttcctgcagaatgtaaaagatattttctccacagatgatctgactattgcaaattttgagggaacactcaccgattctgatgaacgggaggataaaacatttgcatttaaagcacccgcatcctatgcctctattctgacaggcggatctgtagaagccgtaaataccgctaacaatcacagtcatgattacggtgagcagagtttcgatgatactctggcagcactggatgatgcaggaatcgttcatttcggatatgatgaaactgctgttatggatgtaaagggaatcaaagtaggattagtcggtatctatgaactgtacgaccatcttgaacgcgagcagcagttaaaagacaatattgcaaaagtaaaggcagacggggcacagctgatcgtagcgatcttccactggggtaatgaaacggaaaccgttccggacagcaaccagacaacacttggacgcatcgcgatcgatgaaggcgctgatcttgtatgcggacatcatccgcatgtacttcagggcattgaaacttataaaggcaggaatattgtatacagcctcggaaacttctgcttcggcggcaacagttctccaagtgatatggacaccatgatctaccagcagacctttactattgatgccgatggggtaaaaaaagacaacgtgaccaatatcattccctgctccatttcttctgctacctatgatggatataataattatcagccaactccggcagaaggtgatgaggcaacaagaatccttggaaaaatcaatgagcggagttcctggatttctactgcagaaggcagtacttttactgcaaaatataacagtaataatgactcccagagcagttctgcagatacagctgcttcagatagcgatatcgttgatatgaacagttcagcttcagatgacacagacgcagagacatacgacgaatcctatgatactgataattcggacgccgaataaatagagccttcattcatccaaaatcacatccatacttcaaaagagctgaaaaatccagttaaggacttctcagctcttttttatatttttactatgcttttatcaggcagataaaagcatcctcttcgctacttgctcataaccagataattgattgatataattatttgggtgacattatatgataatcatagcatctccaaaagagaaaaatctgtacttttcctgcactgcagtctcataggcatgcatgatattctccttgcctgccagcgcagacaccaacatcacaagtgtggattccggcaagtggaagtttgtgatcagggcatcgatcattttgaaatgatagcccggatagataaagatttctgtccatccgcttccggatttcagaattccatcttctcctgttgcagattccagtgttctgcagcttgtggttcctactgctattacacgtttacctgccttctttgtgtcattgatcagctttgcctgatcctcctctactatgtagaattcggaatgcatatggtggctttccacgtcatctactttgacagggcggaaagttccgagacctacatgaagagtcacatgagcgatattgacgcctttttcctttactttttcaagaagctctttagtaaagtgcaatcctgctgtcggtgctgctgcggagccttcgttctttgcataaactgtctgataacggttcttatctttcagtttatgtgtaatataaggcggcagaggcatttcgccaagctgatccaggatttcttcaaagattccttcataatggaactggatcagacggtttccctcgtccaccacatcaataatctcaccttttaaaataccatttccaaatgtgatcttagcacccgggcgtgccttctttccgggttttaccagacactcccagatatcattctctcttcgcttcagaagcaggatctcgatcagtgctcctgtctcttctttatgtccgtataaccgggcagggattacctttgtatcgttgatgaccaggcagtctccctcttccatataatccagaacatctgtgaaatggcgatgctcaatgctgccatcttttaaagacaaatgcatcagtctggatgaacttctgtcctccagaggatcctgagcgatcagttcctgaggaaggtcataataaaaatctgatgttttcattttatctactcctcttcttccttccactgtttctttaactggcgcacatagttccattctttgtttgtcagatcagctttcttaagaagatccgggcgtctttttgccgtgcggtaaattgactgctctctgcgccacttttctatgtttgcgtgatgaccggacataagaacctccggtacctttttgccatgccactcttccggacggctgtactgcggatactccagaaggtttcctgcaaaggattctgtctcaccggactcctgattgttcagtacacccggaaccattcttgaaatagaatccatcatgaccattgcaggaagttcaccgcctgtaagcacgtaatctccgatagatacgtaatctgtgacgatttcctccagaacacgctcatcaattccctcatagtgtccacaaaggaataccagatcctcttcctgcgccatttctctggccatagcctggttaaatacctgcccctgaggagtcagatatacaactcttggcttttttgccgtacggtttgcaatcgcctcataagcaaggtaaaccggttctgcctgcatcagcattccggcaccgccaccataggtataatcatccactttctggtgcttattgaatgcataatcacgaatgttcactgcctccagtgtgaggagaccttttgtgatcgcacgtccggtaatgctggtattcatgccattttcaatcatctccggaaacagggttaaaacatgaaaattcatttatattaatcctttcatcagatgaatggtcattacattcttctccacatccacatcaaggatacattccctgatagcagggagcagaatttcttcgcctttggtatcctctactacatagacatcattagcgcctgtttccattacatctttcagagttccaaatttgcttccatcttcgagaactacatccataccgatcaggtctgcaatgtaatattcatcttcttccagctcctgcgcttcttctctcgggatccagagttctctttttttatacatctctatatcattaatattatcaattcccctgaatttcaggattacaaggttcttgaaatacttaacattctctatttcaagctttcttttctctctgcctgtgtcaagcagaacatattccagatccagaaatctgtctgcatctgtggtaggatatacttttacttccccgcgtattccgtgtgtcgtagtgatcacaccaacttttaataaatcttccatctgctgactcctataattttcatatcatacgtcatttgcattctgcttttatgcctgctcacagcgaatgctgatccatattccaaatccgcttaaacccaaatcaggagccatgggatgttccacagctcctgacccttattttcattgcagaatatctacaatcacttttttgctgctttttgaagaagctgcttttaccacagttcggatcgctttcgcaattcttccctgccgtccgataaccttgcccatgtcagcaggtccgactttcagttcaacgatgatcgcgtcttccttttctgtctcagtaacaactacttcatccggattttcaacaagagattttgcaattacttccactaattctttcattacatacctccctgacccgtcccctacggacgctgcagaaataccttatcctggtatatctgaattatttttcaattccggcatctttgaggatttttgctacaacatctgtaggctgagctcctgctgcaagccattttttagctgcttcttcatcaactgttacagcacttggctcaaggtttggatcgtatgttccgatttcttcgatacatcttccatcacgtttgcaacgggaatctgcaactacgattctataaaaaggtgctttcttctgtcccattcttcttaatctgattttaactgccattgtttcttttcctccattaaataaaatatattgttttcttatgttatattactgttcagctatgaaacagtaacttttatgtcaaagcgttatccgcttcgctaacttctcaattacagtccgaacggaagtttaaatccaccgccgcgcttaccggcttttccgcccataagaccaggcatctgtttcatcatcttcttgctctgctcaaactgtttcaccagacggtttacttcagagacatctactcctgcacctctggcaatacggttctttctggaaatgttcaggattgacggattgcttctctcctgaggtgtcatggaaaggataattgacttggttctgtccatggctttctcatcgatcattccctcaatatccttcatcttaccgcccatacctggaagcatattcaggatactgccgataccgcccatcttgttcatctgttccatactggtaaggtaatcgttgaagtcaaagtccattttctttaacttcttctgcatgtcctgcgcctgttctttatcgatggaagcttctgctttctcgatcaggctcatgacatcacccataccaaggattctggaagccatacgttccggatagaactgctccagatcagaaagtttctcgcccatacctacatacagaataggcttaccggttactgccttgatagaaagggctgcaccgcctcgggtatcaccatccatcttggtaagaatgacaccgtcgattcctactttatcagcaaatgtgcttgccacatttaccgcatcctgtccggtcatcgcatctacgatgaggatggttgcatctacctgaatgttcgccttgatatctgcaagttcctgcatcatatcttcatcaacatgaagacgaccggctgtatcgataagtacgacattctgctgatttgccttcgcatgctctatggctgctttcgcaatatccacaggcttctgcttatctcccatggaaaatacttccacgccctgtttctcgccgttgacctgcagctgtgtgatagccgccggacggtaaacatcgcaggctactaaaagaggtttcttacctttggatttcagcttacctgcaagcttcgcaactgtggtggtcttacctgcaccctgcagacctgccatcatgaacactgtgatctcatttcccgggcgaagaggcagatctgttgtctcacttcccattaatttcacaagttcatcattaacaatcttgatcaccatctgacccggattcagaccgctcataacgtcctgtccgattgcctgctcctgtacagatttagtaaactgcttcacaaccttaaagtttacgtctgcctctaacagagccatctttacttccttaagggcaagcttaacgtcctcctctgtcaggcggcccttgcttcgcaacttcttaaatacattctgcagtttatctgtcaagctttcaaatgccatatgttataactcctctaaaatctcattggaaatatttacaatttcatcggaatgatattcccgggcaagtacacggatctgctttacctgtgcccgtatattcaggaatttctctacaagatgaagcttctgttcatactcttcaagggtcttgttgcatctcttgatcatatcatgcacaccctgtctgctgatgcccagatcctctgcgacttcactcagcgagtaatcctccagcaccacgctctcataaacctgctgctgtctctctgtcagaagttctccataaaaatcatataaataaccttgctctacaaacttctccatctgtaatcaccttgactatattaacctatttccaatgtgctgtcaagcattttctcttgacagcacaaatttattttttccgatacacttcttaaaaatcttatcaaaaaagccccggcatccatatactgaacaccagggctcccatctcatttatttacatggcagatgctactctgagacaatcacagacttgggcggatcacctttggtctgcatcctgcatcttcgagagctttaacaatctcattcttatgatctgtgccaaaagcctccaatgtgatcttaagttccactgccgcatttctgttcgtacttacaaactggttatgatccagcttgataacattgccctgagccctggcgatcacgcttgccacgcgtaccagttcgcccggcttatccggaatgagcacagatactgtgaagattctgtctctctggatcagaccatgctgaacaacagaagacatggtaataacatccatgtttccaccgcttaagatagaaacaatcttctttcccttcacatccagatgacgaagcgctgccactgtcagaagaccggaattctctacgatcatcttatggttctcaaccatgtcaaggaaagcaacgatcagttcatcatcctcgatagtgatgatatcgtccagattcttctggatatacgggaagattttctttccgggtgtctgtacggcagtaccgtcagcaatcgtatttacgtgcggaagagtcacaacctcacccttcttcagagaagccttcatgcaggcagcacctgccggttccacaccaatgactttgatatgtggatttaacagcttcgcaagtgtggaaacacctgttgcaagtccgcctccaccgattggaaccagaatataatcaacaagcggaagctcctgaacgatctccattgcaatggtaccctgccctgtggcaactgccggatcatcgaaaggatggataaaggtatatccctctttctcagcaagttccagtgcatgtgcacatgcctcatcatatacatcaccatgcaggataacctctgcaccgtaactctttgttctctcaaccttgatcagcggagttgtggtaggcataacgatcactgccttcacaccatatttatgcgcagcataggcaacaccctgtgcatgatttccggcggatgctgtgatcagacctttatttctctcttcatcggaaagagtgctgatcttataataggcaccacgaaccttatatgcacctgtacgctgcatattctccggttttaaataaaccttatttcctgtaagttcactgaaatagctgctcttgatcagctttgtttcctgtgtgacctgttttacgatctctgatgcctgttcaaaactctctaaagtaagcattgttttttcctccattttgtcctaaatgtactcccggaatctttttgtacttgttttgactccgaaaatacatcctaatcttgagcgtccgggttttctttatggtctacatcaaacaacgcatttacaaatgcatctgcatcgaatttctgaagatcgtcaatactttctcctacgccaatgtacttcaccggaatatccagttcagactggatggcaactgcaatacctcccttcgcagttccgtccagcttggtaaggataataccgctgacatttgcgacctccgcaaattgtctcgcctgtgcaagggcattctgtccggtggtaccatccagcactaccagtgtctccagatatgcatccggatactccctctccaggatcctgtaaatcttgcggagttcttccataaggttctttttattatgaagacgtcctgctgtatcgcagagaagtacgtctgcatttcttgctttggctgcagccaccgcatcatagataacagatgcaggatctgctcccgcctgtccgccgatgatctccacacctgcgcggttcgcccactcagtaagctgctctcctgctgctgcgcggaaagtatcggctgctgcaaggataaccttcttgccctggtcttttaattttcctgcaagctttcctactgaagtggtttttccgacaccattgacaccgatcaccaagactacggatttgcggttctcaaattcatactctgtgctgtccacacgcatctgatccttgatctcattgatcagaagctgtttacattccatcggttccttaatatgacgttcggaaacttctttctttaaattctcaataatagaagtggtcgcattgatcccgatatcacccatgatcagaatctcttccagctcttcataaaaatcttcatcaatactggaaaaaccactgaaaatactgtcaaatccggctacgatattgtctctggtctttgccagtccactgactaatcgtttaaaaaaacctttcttttcttctgccatgtgaaactcctcctgttactgggtaagctgattctccaccagatcgacggaaaccagtgtggatacccctttttcctgcatggtaataccataaagccggtctgcggcgttcatagttccacgtctatgggttattataataaattgtgtgtttttcgtcaacttctgtaaatatccggcaaatcgcccaacattggaatcgtccagcgctgcctcgatctcatccagcagacagaacggtgacggcttcagattctggatcgcgaaaagaagtgcgatagctgtcagagctttttccccgccggaaagctgcatcatattctgcagtttctttcccggcggctgggaaatgatcttaattcctgcctccaggatatctgcctcttcatccagctccagagttccttttccgcctccgaacaattccttaaatgccttgtcaaattccttctggatctcgccaaatttctcagaaaactgtttccgcattccctcatccagctcctgaatgatctgttccagagttttctccgctgtgaccagatcctcatactggccggacagaaaggtgtgtctttccagaagttccttataatcctcaatagcatttacatttacaggtcccagctttctgatatcatctttaatctgagctgcctgtcgcttcatctgcgaaagatcagtaagttcctcttttctgtaggaaacggcattattgggggtgatctcatactcggaccacatataggcaatccgctcttccctgttctcctccagcttgtccatctgtccctgcagacggtaacattccttatccagaagtccgatctgaccggacagataatctcttttctcaaaaaaatctttatgctgagaagttctgctctctttctccttctgcagatttttcagctgcatctgtgcctgttcttcataaaggacagactcttccgactcttttttcagctgggtgatcatctcctgcttcttttccatctcttcactgctgtgagcaagagactgataaatatcctctttctcagtcataaaagctgtgatttctgctttcagacggctcaggttttcctggtcaaatttctctttctgttcaagagcggatgactgaagacggatttcttctaactcccgggtgattttcttctcttcttctttccattcatccagttctgactgctttgcctcaataaaactctccagttctttctcatcctgctttgaattctccagttccctggcaatccggtcatgatcctgccggatttccatgacctggcgtttgatctctgcctgatctctgttgatctgagcatatccgcttcggatctcctcagctttcttttcctgctgtttgatattcattctggcagtattctgttctatatatttctgacggagtttttcctgaaatcctgcaatggcatcacgaagcctgtttctctgatttttattttcctcaacagcattctgcatttcggtcagattctgcttcagctgacttacttttgtttccagttcctctatttcacgccgtcttccaagcagattgctgttgtttctgaaggcaccgccggtcatggaacctcccgggtttaaggattcaccctctgttgtgaccattctcagactgtgtctgtatttttttcctattgcaatggcatgatcaatgttatcaattaccagcactcttccaagaaggaatttcgtgatctgctgatactgagaagctacggacaccagttcgctggcaatccccacaacgcccggctctttcagtgcttctttcggtgtaaactcacctctgggacttatgctgctcatgggaagaaaggtcgcacgtccataacgattctttttcagaaattcgatcatggttttggcagtctgctcattatctgtaacaatattctgaatgctcccaccaagagctgtctcgatagcgatctcataatctttgtttacctggatcagatctgcgacaacaccctggattcccggaacacgttctttttgttccataactctccgaatactgtttccgtatccatcatagcgctccgcgatatttctgagagaatccagccgggatgcctctctgtgataggctgtctgttctgcttccagctttgtgttctgttccttcagcttttcctgaatcttcatcacactcagattcagatgttcacattcctcattggcattttcaatctgggatgtaatctcatcatactgtttccgggctgtagtcagaatagtctgctgctcttcctcttcactcttcagtctgagaatacgctggctgatctctgccttacggatttctgcctgttccatcattgcatcaaatctctgggctttacccttgacattggcacggctgttcagaatttcaatgatctcatttttgccattctccacttcgagagtacaggcttccatattctcctgcgctgtccttaatttctcttcttcctcagaaagtttcttacggacagcctttaactgtgcataaatatccgttttttcttcttcaagtttcttctttgaatctgttcttactgaaagttcagcctcaatagtctggatacgtcccttataatgctcttcattctgtgcccctgccagtatctgctcatttaatacattgatctggccttccagctgttgtttacggattgcctgctcctgaccggaaatgcgaagtgcatccattttggaatttaaatcttccagctcctgttccagacgttcatattccatcttggtccggtcataggaactctgggtatccttcagctgattctgcgcaattatgttcttctcttccagttccttgagttctttggctgcagcagcatactccatcaggaacatattcacatccagttccttaagagtctctcttttggaaagataaactcttgctgtctctgactgtttctccagtggttccagctgtctggtaagctccgagaggatatctgtcactctgaccaggttctggcgttcttcctccagttttttgatcgtggtattctttcttctcttaaatttaacaatacctgctgcctcatcaaaaagctctcttctctcttccggtttaccgcttaggatcctgtcgatctgtccctgtccgataatggaatatccttctttaccgatacctgtatcataaaacatctcattgatatctttcagtctgcaggcacttccgttgatcttatattcactctctcctgaacggtaaagccttctggtaaccgtaacctcgttaaaatcaaccggaagcttatggtctgaattatccagtgtgatcgccaccgatgcataacccaggggttttcttgtctctgtaccggagaaaataacatcctgcatatttcctcctcgcagagatctggcactctgttcacccagcacccatctcaccgcatcaccgacattgctctttccacttccgttcggacctacaataccggtgatcccgttatgaaattcaaaattgattttctgggcgaaagacttaaatccctgtacctctatattctttaaatacataattctcctgtttattttctgagtacacgaatcgcctggtatgctgcggcctgttctgctgctttctttgtatgaccgcttccctgtcccatcacttttccgtttactcttgcctccacagtaaagtttttgttatgatccgggccttcttcttttgtcagaatatattccaccggctgtgttccgttttcctgcacgatttcctgcaggatggtcttgctatcataaaagagctgtttatgttcaatatcattcaggataaaattcagcacaaactcctttgcattagcaaaaccaccatccagatagatagctcccagtaaagcctctgttgcatcagagacgatagaatccctgtttcttccgcctgtcatatcctcgccctttccaagcaacagaaactgtggcagtccgaattctcttgcacaataggcaaggcttggctcacacaccaggctggctctcttctttgtcagctctccctccggtatctgggtaaatcttgcatacagataatcactgctgatcagctccagcacagcatctcccagaaactccagtctctcattgctgcccagcttccccagcttcttctcatttgcataggaactgtgagtcagtgcctgtgtaagataatgtttatttttaaaatgatatcctatgatttcttctaattcttctgtctttctattcattcctctaaccctctccacatgcacagggctgtcatctgacaaccctgcggcatcattttttgcaactgctcagtgcgcctgtattatgctcctgtcaaatttcagactgccggacagttacatttttatttaattgtccgaattgcttcaacagcatcaccgactgtctgaatctgttcgacagattcattatccagctcaatgtcatactcctcttcaatccccataataatctgaaaaatatcaagagagtctgcaccaagatcatctacaaatgtagtgtcttctgtgatcgaatctgcatcaatattcagaacctctgctatgatagcttttattttctccagttccatcttcaaccctccttcctgtttctgttcctgtcctgctctattctgctccggacttcagtacttcctgatcctccaggatacgctctgcgatcttctcgttgatcttctcctgtttaaactgtacacactggaaaataccatgtttgatctcaatggctttggcacttccatgcgtctttaccacaagtcctttaagccccagaagcggtgctccgccatattccgttgcatcaaaggatttcagagtttctttcagtgcaggctttaccagaagtgcaccgatcttacttcttgtgctggtcatcattccttctttgatcttctggaccagggcagaaccaactccctcatataatttaaggatcacatttcccacaaatgcttcgcatacgaccacatccgcatatcctgccgggatatctctggcttctatacttccgatgaaattaatgcttttgcattctttcagaagggggaaagtttcttttacaagtgcatttcccttctcctcttccgccccgttatttacaatggcaacttttggatttttaataccaactacgttctccatataaatagagcccatcttcgcaaactgcaccagatgcgatggacgtgcatccacattggcaccacagtcgatcagaagggaaacacccttcgtggtagggatcaacggtgcaagaggcggcctctccacacctttacttctgcctaccagtacctgtccgccaacaagaacagctcctgtacttcctgatgaaacaaaggcatctgcctcctgtttcttaaccatattcaaacctactacgattgatgaatcttttttcttacggattgcaaaaacagggggttctgctgtctcgatcacctgggatgcattgacaacctggatctggttcttcggatatccggaatatttcgccagttccttatctatcacttcctgttttcctgtaagaattacttttatgtcctgtctctctgttacagcttccactgcagctctgacaggttctgccggggcattatccccgcccattgcgtccactacaactctgacctgttctgccatatttttatatctcctgttcacttactgttcacttacagatgtcagaatcaaaagatattttctgttactgacccggcatccgcaaattgccccgctgcaaagcagctcctgcaatcttccataatctgtatcatactaaagaaccctctgcaaagtcaatagcatctgaaaaaaatcacttttcacttttttgtgcctcgattcgctccgccagatcattcagataaacccacctgtccatcttctcatccagatctgcctgtgccttctccttctgctccatgatctcacgaagcttcacagaattggtggcattggcctccatatccttatccagcttctccagcagttcctccagcgctgcaatatcatcatcgatagtttcaaattccctctgctctttataggtaaatttcagcttctggggacgattctgcttccagtctgcctgagccgacttcttcttttccgcaccaactgcattgctctgtccttcagatactgccccgccttttctcgccagcgcctctgtataatccgtatatccgccctcatactgggtcagatgtccattcccctcaaaagcaaaaatcctgtccacaatattatccagaaaatacctgtcatgagacactgcgatcacaatccctgcaaaagaatccagataatcctccagaatggtcagtgtaggaatatccagatcattacttggctcatccagaagaagcacattcggcgcctccatcagaaccttcagcagatacagacgcctcttctcaccacctgacaatttggcaatgggtgcatactgcatggcagaatcaaagagaaacctctccagcatcattgttgcggaaatcttcccgtctctggtcggaatatactctgccacgtcgcggatataatcgatcacacgctgattggtatccatatccggcacttcctgtgcaaaataccctatgcgaatggtttctccaatttccacttctcctgcatccggctgtatcatcccatcaataatcttgatgagtgttgactttccgcacccattaggaccaataatcccaagacgctgattgcgcagcacaatataattaaaatcatccaggatcttcttctcaccaaaactcttgctgatatggtgaagttcgattgtcttctttcccatacgtgtctcaacagaatccagctccacattcgcatcacgcaccggagcctttccgttcttcagtgcctccaggcgttccagacgtgcccgctgcttggtacttctggctctgcatccacgctttgcccactccagttccatgcggagtacgctctgtctcttcctctcactggcaagctccatctcctcacgctctgccttcagttccagaaacttcgagtaattagcctcataagcataaaggccgccatgggaaatctccagaatcttattagtaaccctgtcgaggaaatatctgtcatgagtaaccataatcacaacgcccttaaaacttctcagaaagtcctccagccaggtcaccatctcattatccagatggttggtaggctcgtccagaagcagcacatcacagggattcaccagagtccttgccagtgccacccttttcttctgtcccccggataaatgatcgatcttctcctcatggtttgtaattcccagcttatttagaacattccttgcctcgctctcagtactccagtccttctgccactttccttctgccacataatccaagacagaagctccctgcggaaactccggcatctgcggaagatacgtgattctcaggccattttgagtgatcacctgtccctcatccggctcctccagaccgccgatgatcttcagaatcgtagacttcccggtcccattaatcccgatgatcccaatcttatctccctgatgcaccccgtaggaaacatcatccagcaccaccttctcaccaaacaccttggaaacatgctctatattcaaaatattcataaattcaaacctctctcgtaattttcgcttcctgtctgtttctgctcatctgtaacacttccacaaaaactatagaattcgctcctcattataccatcttcccagccattctaaaacccccggcacagaaaaaacactcccctccgaataaatctatccgaagaggagtatcctcaaaatcacatatttttgttcctgaaaaagaattgcttagttcatctcagttccattctcaactgcatacttcagtccctgcacagcaaccgccagcgtagcttcctctacagtagcgcttccaagatcacccatatccagtgtcagtgtatcatcatcattcactgccacgccaaaagtaagtgccatctcagaaacttcatcagtaatcgtcacagtaccattctcttcatcaaaagtaccttcgccaacaaagcttacatagttatcatcctgatcgatcacaagtactgagcagaaagttccatcctcattagctgcataaataaaagtctcacccgcttctgtttcgccggaataacactctgtcaggatatcacccatatcctgataagtctgattgtaatccgactcatcaccgtctgcctcataaggctccagggttgcagtcaagtccagactgtccggatcataaagttccagaagattctcttcctcatttgcctgcaccagataagttaccatattttcatcatcatacgtgccgtcgtcatttgcgaactgcattaccagagctgtatattctccgtctgaactcagggcatatacaccaagaacatcctgctcttcatccttccactgaccaaaaaacgaattatctttgtagaatccgtagatatctcctgcgctgtccttccagagtcctaacattgcctctgatacatccgcgacatctccgtcatctgctgcttcttctgtagtctcctctgctgcccataccggaacaaccatagagcttaccattgcagcagcacaaagacctgccattatttttttccagtttttcatatttttttaccatcctttcttaaaatgtgtgtacatatttctaaactgaatttctatgttcttactataaaaaatttcagtcttattttcaagatacatgggattaaatgacatttttcatgaaatatggaaaaatgaataaatacttatggtattacttgttttcagtaaggaatccgtacttgaataactcatgaaaatacgctaaaatacaaattatgtttaagttaatttaggaggtactccttttgaatattgcaatccttgacgattcaaaggaagatctgcgtcaggtaaaatctgtcatttcttcttattatgaatcccagaatacatccgcagacatccatttgtattacagcgcagaagctttttttactaaatacatacccggattttacgacctgatcattatggatatttatatgggcagtatgaccggtatggatgcagccagaaagctccgcgaagccagggatacagctgctctgatttttatttcaagcagtgattcctttgctgtggcaagctatgatgtacaggcatcctactatctgctgaagccctttgacccggagaagctttgccggatcctctcaacaatccagttcaggcagtcgcagaattccagatatatagagctgatctccgaccgtacccctgtaaagatccctgtcaggagcatcctgtacgtggatacctaccgcaatgcagttcaggtacataccacagatgcaggcattatacgctcctacataaccttccagaaattcgaagagcttctggagggaatgaaatgttttctctcctgttacagaggctgtatcgtaaatatggatcacatcgagaaatccacagatgaaggctttgttatggacaatcaggagcttgttactgtacgcaagcgtggctccaacgcaataaaaaaagcatatctggaatacttattctcttcagactctgataaataagtatttccgatatgcctcttcccctctgggcagtaactatttatttactgtactgttttcaccggcagaaagatatttactttaaaaataccctcttctgtattaaaaactacatatccgcccattcgttgtaccacttctgctacagacgctgttccgattccaaagccttcatgctttgttgaataaaaaactttttctcttcgctggatttcattggaatatggatttgaaatctctatcagaagcttcctgttcttaacctttgtaagcatctttacataaggcttattttccggtagcagatcttttactgcatctacggcattttccagaagatttccatatattttgcacagatctgtatctgaaatgccaatattctgcggcagcatcatatcacattcaaaaggaatccctttctctctcagttctcctgcataaaaatggatcactgcatctacggccatgtttctgcaataacagattagcttttccccttctgttataacggatgcatactcctgcaggtattccatcatctcctgatattttccctgctgggtgtaagacatgatggtgcgcagatggtgtctcatatcatggcgcatcctgctgatctcatccatcttttctgtaagttcctcataattctgtttctgtatctgcagtttctgttccatctgacggctgtattctctataggtaagctgaaatctgtaagcattggcaagctccatccacagagtcagtcccacactggctacaagcactgctgcaccaatttccgtaaaccacccgccaatgatcggctcatataatctccatatcctgtctgctgccagagacgctgcataaacaacaattcccactaaaagtacattactgtacttctgttttatctcctttacacttctgaaaagcagataaccggctgctgcccacttcaaaatctctgtaagcttagagatcagatacagccctgttgcagactgggctctgctgcacagcatttctgccacaaaaaccatcactccggctgctgcggccacacctgcaagaatttccggaatcctttcctcacctcccaggatcttctgttgtaccagcataacaccggcaaacatcagataatagaacaatgcctccattccataacaaggctgtacttttactgcaacaaaggaatgcaggatcggataagaaccatatcccagcacacagatacaaagcagggcaaaaagtccaaactccacttttttagttcgcatatacatatacactgaaaaaatcaggacaaaaaatgtaaaagccataaataccacagcaatcataagtgacaacccgcggataatattcactttaaaaggagaagccaaaaccggcacatactgaattcccgatgacaccgaatgtttgtctgtcactgcgatcacaatctctgcagttccttttccctcaaaggtaaataccctgttctgaatctgctcctggtaattgtccggatccggatttcccatctgccccatcaattccccattaatatacagcttgtaagcagaaaaaatctctgtcaggccaatagcatattgtttttctttttcaggaagcaccagggtcatccgataggtaccacttccaaaaggagatttatttttgtcgcccaggtccattccaccgtactcgccaatggaaacataacggctgtagtagtcctccttctgttcctttatttcctgcggtgtcagcaatacatccggataatattcccattccctggcaagataatgcacagaatcatcatcaggcacatagaggattccctgaatggcctggtcccccctggccgtatatttgttatcaaagcggtaaaacagaaagaatatgcccatagtcaatgcaaatacagctactataagtagtaatgaatatttccagttcttcttcattgctgacacctccttctgttttcaggtgctttgtttgcctttccactgtcgcttatctgcgttttttacgaattgcaaaaataatggcagccaccaggatacatactgccggtaatgtaagtattatcatcagaaactgtttggcggaattctctgttttctgctctgtcttttgctccgtttcctcctctggcattggctcttctgtaaaacctatatcttctccgtctgaaatagcttccacgctgtcctcaaccgtctggtccccgatattttccgactctccatctgtcaaaaaataatcccctgtctggttgatctccatacggagaacattttgtttttcctgataattcactgcatattgatttccctgcacatcctccgcttttactgtttcaggtaactggattccgccaaacacagatgcctgaaattccaccactgttccaggaatctctgtcactttctcacctctgacaaaaatccgcagagaaaatgcagtttctgacgttttctcgattcctatctggatttcatcctctgcattgatcttccatccattcactgtatccggagaaaatgtcacagagattccctgtttctcaaaccttgcacttccattctgttggatcataagaagcattctctttccactgactgcagtaatggtgtcggtgcttaactctgtcacgaaattctctgtatccgatatttcagcagattttgcatcagaagctttgttactgctgctattctgtccgtctgtattattgtctgttccgtaagagtcaccataataatatccggcacttcccgtattcagattctctttcttttcttcctgtactacttctgacgaagcaggttctttctgcacaatgtcaggaagatctttttcctctctgtccgaaaaatttcgctcatgccagtattcattgacaataaacgcatcattataggaaaaagaataaattcctgtgctccctttctcatagacagcacagatctggtagttctgtcctttctttaatatctctctgtaataaatctgaattccatcagaagtcacttccaccaagtcatcatcaattttccggtaatttccctcattctcagagaggtaaacctgtatgttccggcgttcttctgcagaaaatccatccagcagcataggaaattccagcaggtctaccatcggcatgctgtaggtattaatctgtggttctccttttttctgtacagaaagatatgcatatgcctctggcagcgtcaggctgtcagatacttcatatccctctgggatcacaaatgatccggttaccttgtacacgccttgtttttccctattcacccggctcagatcccaggaagattccagaatcagttccggattctcggctgtattttcaaatgtttcagcagtactgaccctcagtctgacattctccttcaattctttctcaatctgcttcaggcttccccccgtttttactgcataggcagcacatctgctgagatatttctcatctccggtatcataagaacagatgatttttccaggcttctgtgtatttccaagcagattgtgctgataaccgtaaattttaagactgccgtctttttggtattgaaaccgcagagtattggtctgcttctttccattatcataggttaccagcagggaataggtattacccacaaccatactctggttagatacatacagcccctcctcttcacagagagcaaagccctcctcagtgaggttgatccactgtccgctttctttcttcagataagcttccatggagtcaaaattttcctgcttcaaccagggaaatatatagattcctgccgcagtcagcctgtaatatatattaatatccggtttgtccgggtactgcacagaaacagttgtctgtacctgcagacttttactctcatcaaaagcatactcaggcggaagcttcagtacacctttcattgtgtaaacgcctgccagtttcatatttacagacgaaacatcccagaacaccggaatatgcagtgtatctgtgtctgtataaactgtatagaaaacccgagacagtttctcagtaatcagttcgctacttttatttatttctacagctactgcaggaatatcatgaggtacgatcacatcatttacccggatcaccgcgccccatactgtggtattttttttcattccccatatgccagtcaggcacagagttatcattaaaatcagaactgttattttctgttttctcatgcttttttcatactttcattttacattactactcaatccgttatctttattctcaatttcctttgttcttagcttaccttatctggcggatttcggcaacagacataggataaactgcattatttcatgaaaaatggttaattctcctttttctttcctggaaatttcataaaataatatacaataaacaatactgccgtaatgctccatgaaaccggataactgagcatgatcgtattaattcccgggtatatctggccggctgtaaaaagccacaggattctcaaagaacacacaccgccgcaggtaagaagcataggcacaagaaccttcccggtacccctcagcgctccggacaggattcctatgatcacataaatgaaataggacggcagtaaaaaacgactcatatgaacaccatggacaatcactgcgctgtctgtggtaaacagacgataaatccagggagcaaatgaatacatcaaaatgatcagcaccgcagaactggccatactcatgatcatgcagacactcacacttttccgcatacggtgatatttaccggctccgaaattctgtcccacaaaggtagtaatggaaatcgcaaatgcattgatcaccatccagaaaagagcatctattttcccaagagttccccatgccgccactgtgtcagttcccagattatttacaaatacctgtatcacaatattggaaatattatacattacagattccagacctgccggaataccgattctcagaactgaaaacagcattcttctgtcaaaacggatctgattgatcttcagcacatatatctctctggttttcagaagcattactgttacgatcagcgcactgatcacctgagaagtaactgtagcaacagctactcctgtcacacccatgccaaacgcaaccacaaacagcagatcaagaataatgttcagcacacaggtaatgatcagaacatacagtggtcttttggagtctcctactgcacgtaggatggctgctcccatattataaaccaggttaaaaaccattccgccgaaataaatatgaagatacactgcagagtcctctactacatctgcaggtgttttcataagcagcaatgcaggtctggtcagaaaaatccccactacagtaagaacaattcccgctgcaatggagaatgcaaatgctgtatgcagtgccttactcagattcttcttatcttttgccccataaaactgcgagatcacaactgctgcccctgaagaaagccctacaaaaaagccaacgatcagattggcgatctgactggcagaacctccaactgcagcaagtgcctgttttcctacgaaacggccgacaacaatagtatctgccgtattataaatctgctgaaaaaatgttccaaatacaataggaaagaaaaataacagcagctgtttccagatcacaccttctgtgatctgatttaccttctccttctcattcattactttttcctcatccattataatgttcagatgtatccactgtctttatctttatatggatcatctgcagttactgtccacgctgcccggcaaaccgtttcgcgctacacagaattttatagcaattccggaacattacggagtaatttcctataactaacataaaataatacacaaaaaagcaggcatcccaaacgggagaacctgccatactttgcaaccattaaaaattagtcttcaactttaatgatttcctttttgttgtagcttccgcaagctttgcatactctgtgcggcatcatcagttcgccacatttgctgcattttacaaggttcggagcgctcattttccagtttgctcttctcttatcgcgtcttgctttggaagatttattcttcggacagatggacattatgttacacctccttaaatttactaaatatatcactgatagctgccatacggggatccttaggttcctcgacgcatccacagggaccgtcattgaggtttttcccgcactggctacagattcctttgcagtcttctctacataaaaccttcaaaggccagctcatcagtacctcaagatagaccagctggtccacatccaggtccatacctgtgagataagaactttcgtccagatcattcacacggtcttcatccgtaagcttcatatcaagttttcgctcaatctccaaaggaatctctgttgaaacctcttccagacatctgtcacagggaatacctacggtaatcttacccgttcctctgatttcaagatttctgtcacctgtattcgtaatcgtaagctctatgggttcttttgcaagtaccggaaagcttcctgactgaaaggtgatcgtatccattccaaactctgcagtcttctgaatacgcattccttcactggatgaaatatctgataaatgtatctgcatacttttctcctatccacacttgttttattatacataccgcctctgcttttgtcaacgataaattagaaaaatttcacattttgtcaagtaatattcctttacgaagtattttaaccgaatcaagtaagcaccctgcggaggttgcgaatatccgcttaaccctatttcatcatccggcggcattattatcaggtaatttccacatgccttacgggcacaaagaagggtgctcctgacagatgcacccttcccttctatataaatataacttttatccagttatatttctctcgtttggacacaaaacagacactttattatctgtgaaaattaaaccagagctactgtctctctgcagattgcaagttcttcgtttgtaggaattacagcaactttaactttggaatccggtgtagagataacgatctcttctccgcgaactccgttagcttctttgtcaagtgtaactccaaggtatccaagatagcttacaactttctcacgtacaggaatagcattctcgccgatacctgctgtaaatacgatggcatctacaccgttcatagctgcaacatatccgccaacgaatttagcgataccatagcagagaacatcgattgcgttagctgcatcttcgtttccgctctgagctgcatcgttcaggtcacggaagtcactggataatccgccggataatccaagaagaccggatttcttattgagaacgttcatcatacctgcaatgtcaaggttctctttcttagcaatgaattccatgatagcaggatcaatgttaccggaacgtgttcccataacaacaccctcaagtggagtaagacccattgttgtatcaacacactcaccgtttacaacagcactgatggaagaaccatttccaaggtggcagacgataactttggagttatctttgtcaaggccaaggaattcaacagcacgtttggaaacaaagctgtgggatgttccgtggaaaccatatcttcttactttgtagttcttgtaatattcgattggaagaccatagagatatgcttttgcaggcattgtctgatggaaagctgtatcgaatactgctacctgaggtacacccggcataagctcagagcatacacggataccgatcaggtttgcagggttatgaagtggtgcaaggtcattgcattcttctactgctgagattacttcatctgtgatcactacagatttggcaaatttctcaccaccatgtacaacacgatgtccaacagcatttacttctttcaggcttccgattgcgcctgttttatcatttgtgagggcatccagtaccatctggattgcttctttatgtgtaggcattgcagcttctgtgatctctttgtcacagcctgttttctgatatactaatcttccatcgataccgattctctcgcagagaccttttgcaagaactgcttctgaatcagagttgatcagctgatatttaagggatgaacttccacagttgattactaatacgttcattttcatattctgccggcagcaaatttcgaatactgtccataatcctgacacaagtcttcgaatatttctgtcagcttttcctttcatattataatattattctcatcatttccagggaaatatgagtaatgatatcaaaggcatcagaatcagaaatatctcctccgatgcctttaacattatgtagtcaatgaaataattctcagtccgttttacggtctgactgaaatcttatttattgtcgtcagcctggcactgtactgctgtgatagctaccacaccaacgatatcgtctgcagagcatccacgggacaggtcatttacaggtttagcgataccctgggttacaggtccgtaagcttctgcttttgcaagacgctgtacaagtttgtatccgatgttacctgcatcaaggtctgggaatacaagtacgttagctttacctgcaacttcgcttccaggagctttagaagcgcctacgcttggaacgatagctgcatcaagctggaattctccgtcaagtgcaagttccggattctgctcttttgcgatttttgtagcttctactactttatctacgtcagcatgttttgcactgcctttagtggagtgtgaaagcattgcaacgattggtttctcctgaacaagaagttcaaaggattctgcagaagatgctgcgattgctgcaagctcttctgaagtcgggttctgattcagaccggaatcagcaaatacaaatgcgccgtttgcgccatattcgcagttcggaactaccattaagaagaatgcggatacaagttttgtacctggttttgtcttcagaatctgaagacatggtcttaatgtatcagctgtagagtgacatgcaccggataccataccgtctgcatcgcccatttttaccatcattacaccatagtacagatactggttaagaagaatctctttagcctgatccggtgtcatgccttttttctgtcttaattctactaacttgtcaatgtatccctgtgttttctctgatgtagcaggatctacgatctgtgcgccggaaatgtcatatccgtcttcagctgcactctttttaacagcttcttcgttaccaacaaggataacctttgcaattccttcttttaaaattttctctgtagctgccagagttctcttatcttctgtctccggaagtacgattgtttttacgtttgcttttgctctctctttgagtgtgtcaataaatcccatgattaaaatggctcctttcatatagcagttctgatatcacaatatctgtataccagctatcattaccattcacctgatagatacagtgaactgtaatctgttttctgcgctgttttcattataactcctgaagccttgtatttcaagcatctgaatggtagaatatgacataaaaaagtattttttaagatgcaatatggtaaaaaagagagaactctacagaatttcagaaaggagcatctgtgtaaatttatgaaaacagcaggaattattgcagaatataatccttttcacaaaggacatgaatatcaaatccggtatacaaaagaaaagctaaaagcagactacgttatcgttgccatgagcggagattatgtgcagcgcggcacccctgctcttatctccaaacatgcacgtgcagaaatggctctgcggtgcggcgctgaccttgtacttgaaatgccggtatctgtctctactgcaagtgcggaagccttcgcaatgggaggtgtttccctgttggacggtcttggcgttgttgatatgctctgctttggaagtgaatccggggatatcagcgcactgaaagaactggctgagatccttgtagaagaacctgaagaatataaaaagctgctgaaaagctttttaagcgaagggctgacttttccggctgccagaagtcaggcactgacagaatattttaagaatccgcgcaacttcaatggtgacgattttgacggagtccttactcctctgttaaatgaagttacacagatcctgaatacaccgaataatattctgggaatcgaatactgcaaggcacttctccgcctgaacagccaaatccgccctgttaccatccgcagggaaggaatggggtatcatgaaaccgctgtccctgaaggtgattcagcaagctcctcccctgatttacagtcatctactgatttctttgcatctgcaactgctatacgcagtcttattcagaatccgggaggtggccattcagaggcaatctcagacataaataatccagtcaggaatccggataccaaaactgccaatatattatcatcccagattccaccagatgctttttacgttttcaaaaaggcgctggactccggtgaatttctcacagaaaattctctggactctattctttcttactgccttatgaaagaaaatgtagaaagcctttcttcctatatggatgtttccgaggatctcgcccggcggatcataaatcagcagaatcttctgttgtccttttcccaatctgtatctgttttaaaaaccagagagctgactcagacaaggatacagagggcattgcttcatattatattaaatatccacactgcacccactcagattccctttgccagggttcttggtttccgcagggaaagcagtgaactgctaagccggatcaagcagcacagccgaattcctcttatcaccaagcttgcggacgcccaaaatcttttggacagtgacggaaatcagattttatctgaaactgttttttcttccaatttatatgaaaaacttctgtgtctgaaaaccggcagaaaattctgccacgagtcccagaaacagcttattatcctataattcttgttgtttggatgcacttatgttaaaatataaacagtgaggataaggatataaaataaggaaggaggaaaagaaaaatgaaagctaattcaggtttgaaaaagaacagaacaaagatccagatggtacttaccgccctggtaatcttatctgttgtacgtcagtttttcctgggaaattaccacaatatgtttctgggaatcctgacattgatcctttttatggttccccagtttctggacaggaaactgaacgtcacaataccaccgggactggaaacagtcattctgatctttatcttttcagcagaaattcttggcgaaatcaatgccttttatgtaaaaatccctatctgggataccattttacatactactaacggttttctgatggctgccatcggatttgcactgatcgatctttttaaccgcagtgacaggttttccattaaaatgtcaccgtattttgtagctttttttgcattctgtttttcaatgactgttggtgttatgtgggaattctttgaattcagcatggactggttttttggaatggatatgcagaaggactggatcgtaccggccatcaactctgtgaagctgaatcctaccggtgcaaatgttccgatccatgtagatgttcagtccctggccgttaacggcgagacctggaatctgggaggctatcttgatattggtattgttgataccatgaaagatttgatcgtaaactttatcggcgcagtcgtattttctatcatcggtattctgtatctacgaaaccgcggaaaaggaaagctggcagcttctctgatcccgcaggtacgcagcaaacaggaagaagaacattcttccagagatcagtaagatccacagctaccgaaactggcgcacttttctggaaatattctccaattcttctctggaaagctcaggaagtctttccagctgatccataaacatggcaagtgtctcttttcgctgcaattccaccatctgggtgtagaaattaaccactaccccggtggcaatggcaactacaaaaagcgaatagatcgtcagaagaacggaacacatttttccaataaaagtaaccgcaaccacatcgccaaatccggcagtggagatcaccgcatagcaataccacagtgcatctccgtatcggttaatgtccggttcaaccagctggatcactgctgcgatagcaaaaataaacacaataaaaccaatgataattttatctgcgcgagtccgttttaacacactgcctaatactttaattcttttcatgcacttgtcctccaatgaaataatatactgcctgaaattaattgaagtatagtataaaacggtttcacttgcaatatgaaaggagcttaacagtatgaaagataataaagcactaaaatacctcactttgatcaccggagttttaacattgttattaggagtctacactcttgtaagaccaatgagaacttttcttgccatcggatggatcctgggaatccttctgtttgtaaatggtattgaacttgtaatcctttctttatccaaagaaaagaaagaaatcggagcatgtattctcggtgttctggaaggacttgcaggtattatcttattattcagcggcattcagcggttcatcacagacgtaatggcagcttatatggtcggtgcaatcattctgatctacggtattttccagattgccgccggcacaaaggtatataaaacatctaaaggaaaaggtatcctgagtattgtgtgcggtgttttatccgtaattgtcagcatcatttcatttacccatcctatacttaccatgatctctgcaggatatatgatcgctttttctgttttgatgcagggtatcaatatgatcgtacttggaatcaatttcggaaagaccgaaaactaacaaaaaggttatgactgtatggataacacaaaaagccccaaaaacgtatctttaaaaaatcagcttgaattgtggctgttctgtgcactcattggtgctgttgccggtgcactggtatggatcctgctgaaaataatggcagtgggaactgaatttctgtggaaatggcttcccgggaaaacctctgttccctattatacgattcttatctgtgtagccggtgcggcaattatcggtattttccgaaaaatattcggagactatcccgaagatctggaaaccgttatggaaaaagtcagagcagaaaaaagatacgaatacaaaaacatgcttgtaatgatggtggcagcactgctgccattactcataggaagcagtgtaggtcccgaagccggacttaccggtattatcgtaggtttatgctactgggccggagacaaccttaagtttgccaaacagaataccagaaattattcgcagatcggtgccgcagtctccatgagtgtgctgtttcatgcacctctgttcggcattttcgaagtagaagaaaactctgaggaagaccttgcagccttaacaaagggttctaaattatttatttacggaatcgcgctggctgcaggcactggtatttatgcaggtttatctgcactttttggtgcagggctttccggatttccatcctttgatatggtggaaatccagagaaaagactatctgcttatgattctgtatattttgtgcggtcttatcctggcatacttctatcaggcaacacacaagctgacgggaagtatttccagcagattcccggcagttgtcaaagagatttttgcaggtttatgccttggaatcgcaggttcattcttacctgcacttatgttttccggagaagaacagatgggaacacttatgaaaacctatacctcttatctgccgctggcacttattggcattgcgttttttaagctcctgctgacaaatctgtgtattcagttcggtttaaagggaggacatttcttccctgtcatctttgccggagtatgtatgggatacggcgtggcaatgttgacctgcgggccagacgggggacatgtggtatttggagctgcaatcgttactgcatcacttctgggtggaattatgaaaaagccactggcagtaaccatgcttctcttcctctgcttcccggttaaaatgtttatctggatattcatcgcagcagcggttgggagcaaacttatcacactcaaaccagagcaggaaccttctgcaaattacagcaagcaatagagtcgctaccagacaaaaagaaccattatatcagaaaacatggctgtatgcttcaggcaacaactataacttctgtatataatggttctttcatttacaagtacatgttatttttataattacttttctccggaaagaagaatacggtcattatccagcatcttaccggcacctgtcttaaacttctccagaagaccttccactgtcaggcctttcttttcttcttcatggatatccagcacaatgtttccggaatccatcatcagaatacggtttcccagatcaagggctgactgcatattgtgggtgatcatcagacaggtaagctgatgctcctccacgatccgtttcgtaagattcagcaccttctctgctgttcccgggtcaagggctgctgtatgctcatccagaagcagaagcttgggcggattcatggttgccatgagaagtgtcagcgcctgtctctgtccaccggagagaagtcctaccggctgagtcatacgtttctcaagtcctatatccagaagtttcagctcttcatggaatcgctctttctcctgtctggacacatgggaaagccatccgcctttccctgctgcaagcgccagattctcttctatggtcattccgggtgcagttcctctcataggatcctgatacaggcgaccgatggtctttgcacgtacatgctggggcataaaagtaatatcctgtccatccagcatgatcacaccggaatctgtaagaaaatctccacagattgcattaaacagagtggatttaccagctccattggaaccgatgatcgttgcaaaatcgcccttctccaaattcagggataaatctctgatggcctgtttctcgtttaccgtacccggattaaaagtcttggaaatatgttcaatcttcagcataaatcactgtactcccttcctgtgagtcattcttctcttaatctgcggccactgttttttcaaatatggacctgaaatagccagcacaacgattacagaagataccagtttcagcataaatgccggcatattgaatctcagtgcgacggtatataccagacggaaaataaaagatccaagtaccatgccaacagctctcacgaaaattccacctctgccaagaatcgtaccaccgatcagcagggaagccagcgcgatggtaaccattccctgtccgatattgatatctacagatttctgtgactgagacagaagacatccggaaagtgctgtgaaggagttggcaacacagagacctactatcgtagtaaataccggattaatagatgaggattttaccatatctgcattatttcctgttgccctgattgccagaccaagtcttgtccttaagaaaaatacaaggaagacaatcacaattgctactgcaatgaaagcaactacaatatctcctcttcctttcagcggtgtacttttcaatgtttctttcatcatggaaaataccgtctctgttctgttcatattgatcagggaggaacctcccatcactgcaatattcacagaataaagagccgtattaacgataattcctgcaagaagactgtcaacacccagctttgtctgaagtatggctgtcacaaagcccgagcatatacctgcagccatagctgcaaaaattgataaaaaaggatgtccgctgactgccactgctgctcccactgctgctcccagtgtaaaacagccatcagtggaaaggtcacagacattcagcatggaataactgagaaacagggcaagaactgtcaatgaacagatcaggccaagtttcagcgcggtctctccaagagagagtatagttgcaatagtcacgatgatttcctccagtttgtatttattttattacattcaatgaacagcaacagaaaatatctgctgctgttcattttaattcagaaaatatatcagtcttttcaaccggcacaatggattccataaacccagaacttattctgaatttattcaaaatgctgtccaaatatccttattatttctctacatcatcaaagctctctgctgtaacgatctcatttacctgtgtgcataacggctcgaaatcttttttaacagtttcaagatcaagtccaagtccctcgcaggtttctgtgtttactgttgcagtaccattatcaaaagtttcaacagatgttgttgcaggatctgcatcattcataaggatgtctgcgatcatatctgctgtcttctgtccaaggtttgcataatcaacaccatatccgacaaatgcaccatttagtgcaaaggagtcagctcctgtatactgtgggatacctgcatcaatgaatttctcatagatagaaagctctgctgtcataattgtgttgtcagttggtgtgaatactgcatctacgccatctgccaccagtgcatctgctgcaagctgtacctcatctgttgtggtacctgtacgctctacatattcgacgccttctttatccagataatccttggcttcctggatggctgttgtagaagaatcctgtccgatatcgtataaaagtccgattttctttacatccgggttcactgcctggatcagtttcatgatggatgctgtatccagataatcgcttgtacctgtaatgtttgctccaggtgcatccagatcctctacaagaccgcttcctacaggatcagacactgcggaaaatacaaccggtgtatcggttccttctgttgcggactgcatacgcattgctacaggtgttgcaatacctaccatcaaatctacattatcagcctgaaaatcagaaatgatctgttccataacattggcatctgcattacagttatcataggacacatcaaaatttacgtctttttccttgccgatttcttccagacgggactggatgttgtctacgatctgattcaaggaagcgtcatctacataattgcagataccgatcttgaaatcctgtgccataaccggtgatgccatcatcatagttgccattgctgttgctgcgattgctaatactctttttttcatagtcttttttcctctctctacatcttatttagcagttcatggttttttaactgccatagtctcagggatgtttgccaatcccttgttactgtctgtgagaaagaactccccggattcctctttttcccggatgtgtcaactgctgtgatacccacctgccatcagcagattttcctgcattacagggggtgccatataacagattctctttatatataaaaaaatccgccacaagctatctgttgcttgagacggtaataagaatcttattatcgcggtaccactcaaattgacgaattgtccactttctcatgtacaaacatacactcctgatttataacgggttcggttcccgtcggtgcctactctcacgcttatcaagatttcggaccgccctcgaaaggccattcaacaatcagtttcatacggcttcccaccaattgccgttctctggaatgattcttggttgtttactcttctttctcatcggttttgatgtgtttactttaccacgctaatgcagatatgtcaagaggtttattttttatttttttccaaaagggacgcgaaggaatgggaagggatttcgggcttagtttcggaaccatgtaattctaaggcatttgggaagttgctaaaagcattcaaaaaaatctcaaactcgcttcgctcagacagtgagatttttttgaataacgcaacttcccaaataccaagaattactatgaaccctcaaatgcgcccgaaatcccttcccattccttcgctgtgtactggcggattaacatatatttccttttcgacagcatgctgaattgcttgctttctgcaccaccgcaggagacttatttaatcgaatcaagtaaatcccctgcggtggttgcgaaaagcaataagcagtgggtggggacttgccttctgttaaatgcctgctgcaatgatattgggacctgtatatttcagaatagcaatgtgtaaacagtgatgtttacagaactatgtgataagtgttaaaataatgttcagaaaagatctgcgatctgctatgtggtgattttaagtttatatagattagattatatagaaatgagggatattatatgtcaacagcaaaaatgatttttcatgggagtgatattgagaaaatatgcgaggtctatcagcttaagccggaggaaattgtgaagtttggggctaatgtaaatccgctggggctttccgagcatgtaaaggaacagcttgcaggacggctggatatcctgtcttcttatccagacagagattatacttcacttcgcagcacaatttcagaatattgtaatattcctgctgaattcatcctgcccggaaatggttccagcgaactgatcgcactgctgatacaggaacgaaatccaaagcatacccttatcctgggtccgacctattcagaatactccagggaactctccttctccggaagcactcaggaatactaccacctgcgcgaagaggataactttgttctcgatgtagatgacttttgccggactctggatagaaaatacgattttctcatcctctgcaacccaaataatcctacatcatctgcaattagcataaatgacctgcgcagaatcgtttccttctgcaatgagcggagcattttcgtgatgatcgacgaaacttatgtagaatttgccccggatatcaatgagatcactgctgtcagccttaccagagaattcacgaaccttatgattctgcgcggcgtatcaaaattctacgcagccccaggtatgcgtcttggctacggaatcaccgggaacctggaatttctcaaaaaaatgaaagaaaaacaggtaccatggtctctcaacagtctgggagccctggccggcgagctgatgctccaggataaaacctatatccgccagacccgggacctcattctctcagaacgcacccgcctgctcaaagcactgaagaatatccccacttacaaaacctacccggcctacgccaacttcctcctcctgaaaatccagaagcccggcctgacctcccaggacgtcttcgacgcctgcatccaccagggtctcatgatccgcgactgctcctccttcgaatgcctggacggcgaatacatccgcttctgcatcatgcaccccgaagacaacacccgactcctcaatattctggaatctctttaattgctatagttaaaaccagataccagcggagcggaaaatattttgtctggggtgcatttgcaggagtcttagatattcttagttttcagaaatctgcgttatgagctggctgcatcactgtctgagcgaagtttgcaacggagcgagtttgacaagacggctcatgcttttagcagatttatggaaacttagaatatcttaggctccgaaaccgcaccccagacaaaatattttccgctccgcgtctctcttgaacataaaaagagccagaaactccccttttccgaagtttctggccttttttatcagtttttaaagctatggatcggtgccggaatccttccgccacgctgcacaaacgcatcacaggagaactggttcaccggcatgatcggtgcataaccaagcagtccaccgaactcaaccacttcgccaacccccttaccaattaccgggatcagacgaaccgccgtagtcttctggttcaccataccaattgcagactcatccgcaataatacccgcaatcgtagaagccttcgtatctccgggaattgcaatcatatcaagacctacagaacatacacaagtcatagcttccagcttctcaagagtcagtgcccctgcattcaccgcatcaatcataccctgatcctcgctgaccggaataaatgcaccactcaaaccaccaactgctgtagaagccataactccgcccttcttaacctggtcatttaacagagcaagcgcagctgttgtgcccggtgcacctgcatgctccagaccaatctcctcaaggatctcagcaacactgtcaccaattgcaggagtaggagccagagacagatccacgatgccaaacttaacaccaagacgtctggaagcctcctgtgctaccagctgaccaacacgtgttaccttgaaggcagtacgcttgatcatctcacaaagagtttcaaaatccttacctcttacctgttccagcgcagtcttaacaacgccaggtccgctgacaccaacgttgatgatagtgtctgcttctgtcacaccatggaaagcacctgccataaacgggttatcatccggtgcattacagaatacaaccagcttcgcacatcccagggaatcctgatctttggtagctttcgctgtttccagaacgatctcacccatcagcttaacagcatccatattgatacctgtacgtgtagatccaacatttacagaactgcagacacgctctgtcttcgccatagcctgtgggatagattcgatcagaagtctctcagcaggagtcattcccttgcttaccagtgcagaataaccgccgataaagtttacgcctaccaccttggcagccttatccagagtttctgcaatagttacaaaatcttcctttgtcttacatgcagctccgccaatcaatgcgatcggagttacggaaattcttttatttacgatcggaattccatattcaccggaaatagcctcacctgtagataccagatcctttgcacaggttgtgatctttttatagattttctcatttaaaacagcaagatcactgtcaatacagtccagaaggctgatacccatagtaatggtacgcacatccagattctcctgctcgatcattttattcgtttcatttacttcaaaaatattgatcattttgtttttctcccttgtatgttctctcagcatttttcaggcaatctgatacaggaaagtccctcagtggcttacctgcttagattttctcagattctgtgcattacattgaagatatcttcatgctggcagcggatcactacaccgatcttatctccaagggcttccagttctttggcaagaactccgttgtctttctcacatttgctggcatctgttaccatcatcatgttgaaatatccctgtacgatggtctgggagatatcaagaatgtttacattattgtctgcaagataagtacaaacctttgcaataattcctacggtatcgtttcctactactgtgatgattgtctttttcataagttctttgtcctttctacactgtaattacttctgatatgcaatccctctgtgccacctgaattctgaaatcacgcgacttataagggttgtcacctaaggttacttctgaacagacggtttcatatgccagttcctcataattattttccctgctcagatgtccaaggaaaatccctttcatattgtcatgcagcagcctgcataaaagcctgcctgcattctcattggaaagatgtcccctgtctccaaggattctctgtttcagataatagggatattttccaacctgcagcatacggatatcatgatttgcttccagaagaagcgcatccagattctgcagattaccgactatgtactcattatattttccaaggtctgtagcaatccccacagaatgctctccacactctacccggtatcctacgggctgtgcagcatcatgagggatcgtaaaaggattcactgtcagatcattaatctcaaaaggctcatcttcgtgtatctcacgaaaaatcccttccggcatttttccaagattcatgtgagataaagcttccacagttccttctgtcgcataaaccggtatctgatgtttccttgcgatcacgcccagacctttgatatgatccgaatgttcatgtgtaatcaagataccatcaatatcttttcctgtcaattccagagaattcaatccctgttctactctttttccgctgatgcctacatccaccagaagatgggtattatctgagcccacataaatacagtttccgctgcttccgctggcaatgctacaaagtctcatattttctgattccttcctcaatctgccgtctggtctgtgcaaaatctccgttatttaccacaacatagtctgcattttcccgaaaaaaagtctccggtgcctgactggcaatgatactgactgatttctctcttgtataaccgcggttctccatcagtctcctgatacggatctcttcatccgtatgaatataccatatcgtatcgcaaaactcctgataatgatcttccagaaggagtgcagcttccaccacacatatcttctgtccctgctgtttctttacagctaactgctctctgatgtactgtttcacagcaggatggatgatctgatttaatttctccagaagctctggatgtgaaaatactacatccgaaacctgtctgcggtcaatagttttatcattttttatgatttgtcttccaaatagtgcaatcaccggttcataacaggactgccccggctccatcaccagatgcccgatctcatctgctttcatcacatatgcctgatacttttcttcaagaaaatcaagcactgtactttttccggcacccactccgccggtaattcctattgttatcatcatcacttcgcctcataccagttattaccctgatgcatatcgacttccagttctacggaaagctttgcggcacctttcatctcttcttcaagaatagcagaaacctgcgggatttcctctttacaggtctctatcagaagttcatcgtgtacctgaagtacaagacgggatttaagattctcatcctttaatcgtctgtacacacggttcattgcaattttaatgatatccgccgcagttccctgtattggagagttcatggctactcgctccccaaaagacctctgcataaaattaccggatttcagttccgggatcggcctgcgtctgccaaacatggtagtcacatatcctttttcttttccctcttccaccagtccgtcaagaaatcctttgatctttggataagtttcaaaatatctttcaatatattctgctgcttcttttcgtgtgatacttaaatcctggctgagcccaaaggaactgatcccataaacgattccaaaatttactgccttggcatttctcctctgcagatctgtcacctcatcaaagggcacatggaatacctctgatgctgtatgtctgtggatatcctgggcttctttatatgcctggatcagtttctcatcccctgacatatgtgccagaacgcgaagctcgatctgggaatagtccgcatccagaaatacatatccctcttccggaacaaataccttacggatcagtcttccaagctccattcttacagggatattctgaagattcggctctgtgctgctgatccttcctgttgctgtaattgtctggttaaaagtagaatgaatcctgccgtcctctgcgatctcaccaacaagcccgtctgcataagtagatttcagtttcgcaagctgacggtactccagaatatcctttacaatgggatactccggtgcaagcttttccagaatatctgccgctgtggaataacctgtctttgttttctttccacccttaaggccaagcttttcaaacaggatcactcccatctgtttcggagaattgatattaaactcttcccctgcctgctgccagatctgcttctccagttctccaatacgtacacttagtttctcaccgtagcttttcagttcttcactcttcacgctgattccccatttttccatggaatcaagagtaaagatcagcggaagctcaatctgtgtatatacattccacatacctgtatcacgcagtgcttcacacatgggtttccggcaggcaagtgctgtataggccatgtagcaggcccatgctgcaagcccctctgcactctcctcccatgctttttccactgttttctttccaagaagttcctctcttgcaggcaggatacgaccattcagatattcctttgccatatcatcgtaagtataggaggatttcagaggattcagcagatatgcagccacacctgcatcaaatacagccatcggatcatcagattttatatgcttgagtaatgcctttacatccaatgcacatacacattttttatcatatttcagagtaccgtctgtattgacatcagatatctcattttccggatccttcttcacatcatctgtattagatttcataatattctctgtgttggattcagatactttatgaaggagcccttccaattttccgcagagataaccttctgtgatcatcccttctacaggaatataataaatttcctcttcattcagcgcaagtcctgcaccaaataccctgccattctctgtaaccagagaaacacccgctgtctttcctgcttccgctttcgcaaacagcgcttcacagcctgccaggtctgcacatgtgaaaaactcctgttccagcgtatcttcctgtactgccgcagagtcaaaacggttaagcagattcttaaattccagctgtctgcagagaagaaaagcttcttttgtataaagatttcccagttttgccttttcatacgaaaactctatgggactgtccgtacagatcgtagccagagccttgctcatctgcgccatatcataatgttctctcattgattccctggctctgtttggcttcagctcttccagatgttcatgagcattctcaatacttccatactccacaataatctttgtggcagtcttctcacctactcccgggattcccggaatattgtcagcactgtcacccatcagagcctttaactcaatgatctgaggaggtgtcacctgatatttctcgatcacctgctgtgcatgataatcctctatggtggtcttgccccttacagtctttggcaaacggatcataaccttatctgtcgcaagctgaagcagatctctgtcaccggaaaggattgtcgcatccattcctgccgcttcgcttttcctggccagagttcccagaatatcatccgcttcgtagccttcttttgtcacaacattcacacccattgcagtaagcatttctttaatcagcggtacctgctctctcagttcttcaggcatgggtttacgtgttcccttgtatgcttcaaacatcttatggcggaaagtcggtgccttcaggtcaaatgccactgtcagatactgaggcttctcttcctcgatcgtccgaagaaggatattcaggaaaccatatactgcccctgtgtgttttccttctgaatttgtaagatccggcagaccataaaaagctctgttcagaatactgtgtccgtcaatcagtaatattttttcgctcataaaatcctccagtgtctttatagaatgtaatttgtctccatcattacaaaaatcaatattgccgcaatcgtagcgatcagaaggcatatacttactccaaacatcagccaactggctttcttcttgcggatatatcttctggatttccggatatcctgttccagcagttttttgaaatccagaaccgaatcgctgctgtcatcatcaagctgctgtgttacctcatgtacaataaaatatgtttccagttcatcataacaggaagaacaattctgtacatgatcgagaaactcttccagttcatttagtggaagatcatgtttaatataactactcaccattccttctgcagttcggcaatccatcttcattcccttctttcttccaaaaaacatccaggatgctgcgttcactattacgaattataaccgaaccggagttaattggcaaggaaaagcagcagaagctcaaatcgcctctgctgctttcattgctgttcactcagttttcagtgacataaccaaatttccggattgcctgtggcaatggacttttggcttgtatatcttgagaaaatatcacttctgcaaattcactttcccggaagatgtatctgcatcagcttctgtactgttttcggattctgcattgttctcagactttgtattactttcagattctgccactacagtgggaacctgtacaggtgcattcaggattttcataaattcctcacctgtaattgtctcatgctcatacagatattttgcaagttcatggagctttccgatattgtcctgaaggattttcagtgctttctggtgttccatcctgacaagctccacaaccttcttatccagaagagtctgtgtctcaaaagaacagcttaagctggagtctccgcccagatactgatttgtcacattctccatggcaaccatatcgaagtcttcactcataccatatctggagatcattgctcttgcaagcttagtcgcctgttcgatatcattggatgctccggttgtaatagagtggaagatcagttcctcagcggcacgaccgcctgtaaaggtcgctatcttatttgcaagttcttcctttgtcatcagataatgatctccgtcatccacctgcatggtatatccgagtgctcctgatgtacgcggaataatagtgatcttgtggaccggtgcagattcggtctgctttgctgcaaccagcgcatgtccgatttcatgataagcaactatcagtttttctttattggaaagaactctgttcttcttctgatatcctgcgataactacctcaatactctcctcaaaatctgcctgagtggcaaattttctgccgtcacgtactgcacgaagtgctgcttcattgacaatatttgcaagttctgcaccggaagctccggctgcagctttcgcaatctcatcaaaacgtacggaatctgcgatcttaatcttctttgcatggactttaaggatttcttcacgtccttttaaatccggaagttcaacaggaatacgtctgtcaaaacgtccgggacgaagaagtgcgggatcaagggaatccggtctgttggttgccgcaaggatcacaacacctttggagccgtcaaaaccatccatctctgtaagcagctggttcagagtctgctcgcgctcatcattaccgcctgtaaatccggcaccatcacgtttcttgccaattgtgtcgatctcatcgataaatacaatacatggagctttctcattcgcctgtttgaaaagatcacgcaccttggcagcgcccataccaacaaacatttccacgaattcagaaccggaaatggagaagaacggaacttccgcttcaccggctaccgcttttgcaagaagtgttttacctgtacccggagggcctacaagaagggctcctttcggcatagatgcaccgatttctctgtatttctgcgggttatgaagataatctacgatttctgtcagaagatccttggcttcgtcctctcccgctacatctgagaatttgattcccgtagatgatttcacatatactttcgcattactctttccaaatgacattgccccaccgggacctccgcccatggaactcatcatcttcttgctgagccaccttccaagaaggataaagatggcaatcggcagtacatatcctgcgatcagactgatccagatagatgtctgctgtggtgctgctgcaccgaacttgacatttgcatcatgcaaacggtctacaaggtcaggatcattcatcttgacagttctgaaataaccctcctgtccgtcactctctgctacataataaatataatcatcctgaatttctactgtcttaacgtaatccttctctactcctgtcaggaaagtactgtaatcagtcgtctgtacctttcgtccctcaattgcaggaagtaacagcacattcagaagaatgataataactgccgcaatgatataatatacataaagcggttttctgccaggctttttattatcaaggttcattggcttttcctccatttcgttttgttatgatgtaccatatcacttattcatctctttttcaagaaaagcgagataaatttcataaagattttagaattatctgaactgttcaatacggcaaataaaaaaaagcgaaaaccttcacaaacaaaggcttcgcttactttttaatgccggcagtgggacttgaacccacacgtggttgcccacaacagattttgagtctgcctcgtctgccattccgacatgccggcattgaaacgagtattatcatatcacgtttttgtcgaaatggcaagggcatttttgagttttttttaatatttcacaaacctcgttttagaatacacattgcttgccttgatcagtttctgatatctggcaaacagcttctcaggaagtctgatagttactgttttgttgaccgcaaaagctttttttccaacatagttcagtgctgtactgttgatcctgatcactttgactgccgggcactggtaaaaagctctggcatctatatgtctgacactggcaggaagtataaaatttcgcagttttgtacactgtgcaaatgcgttgctgccaattctttttactctgctgccaaatcttatgttccgcagattcgggcactggctgaacgcatattttccaatcgttgttacattatttccaaaaataacatctgtaatttctttgttcccgctgaaggcattcttgtcaattgtagttactttataaactttatcattgatcacaactgtagccggaatctgtatcacattatattccgcagcaagacctgtaacgcttacttctctttcatttaaaatcttatagccaattccacctatcaggtacttatagcttccaccctgttcagttaacggagctgcattgaactgatatctcacaggttgtacaatatcgtttttctcccatatacctcctgtatattcttctctctggaaaaagatatatatattgtatgcacgttccacctttgtataaataccctttgcagaaccgatttcccatttcctgtgaatatcgctttcctgcggtttgagagaaagactccagtataatggtgtccatctgacatctccctcaacaggattcgtattctgcgttccggcaccggtcacattaaatttatagtaagtgttgggatagaaaaccagaggtttgtcaagtccttcaacgacactgtcatttgcacttacccctttgctttcatctatgtctgttgaagtttcctctccggctgcccagatgaaattctgtgtatctgctccatcctgaaattccgctgcaccggtcgtactaaccggaactgctgccagaacacctgccagcaccatagctgctatttttttcattactctctcctcctctttttcagcagtatataaaatatatacaactgctcagtcctttcttatagcaatagtgaactgttactgttctgcttacaatttatatctacatcttgtattttacttatttttctgctaaatgtctaccttgattttctgctaatcctgtcgtatttttacttcatctgtattccacttctcatacgtgatataatccgcacccattttcctgaaaatgtctaccatatcttcattccggcaaagccatacggatatgcggattccactctgatgagcattgttgatatcattcatactgatatttttatactctgcacttatgtccagatcatatttcttacactgctgtatcatagaagcattcatgcgcactgtacgaatccactgcaatttccctgtaaatcccatctcacgcagtttaccaagtgtttctatgcggaaacagatgattaccggctctttctgtgattcagtcagaagctgcataaacaaattcatggcttcttccgtacggattgactttatttcaatcaccggcgtcacagagtacttattgcagcatgcaatatactgttccagtgtaggaataagattatccggatactgtgaagcatttcttccatttataatcggatactgctttatctcctcataagtcatctctgaaataagcctgtcctccccgcacatccgcagcaaagaatcatcatgagagacaaccagaactccatctgcggtctctctcacatctgtctccacaaactccgccccattgcgtcctgccatctcaaaggcaggcacggaattctcaggtgcttctgtctgttcacctctgtgcaaaatataatgagtaactccatccaggggtttccggaacttttcctcatcttccggtgcaggtgtgattttcggagttggcgtgaccgttaccgtcggctccggggtcacagatggtgctggttcatccggcgtcagtgtaggcgtaatttccggagtttctgacgctgccggcaggacgatcacttctatctctgatacatacctgtcagtaccataggaaacacaggtgattttgacatttcccgccttttttgcagtaacttttcctttctttgatacagttgccaccgttttatcagaagaagtataagtcagcctttttccatacttctgcggctccagaataactgtctttcctgctgttactttcacctgttttttgtatttcttaaaaagaactgtttccgttttattacagacaaaaacctcgcagtttactttcagtccactcatctgtgctgtgatcgttgcctgtccgggctttaaaccatatatcctgccatttataacctttgcacattttgagttactgctggtccatttaaacttctttggactcacttttgtatcatgattcaggatctttactgtataagtggcaccggtctttacaaccacctcagatttatgcactcgatattcgtctgctgcataagtattatctgccacagatattatactgataaaacctgtaattataagcacaatagcaaatatggcagaccttacagtctgtatgcctgctcttttgtctctgtattcttttttcttatctcccattattctatctctcatctctcatatgccattcctgatctgctgcttttatttccggtatgttcttaaacacttcacaatcctgatcacattcgtctctgatgcagggacagaccatctttacttttttaaaatgtccggaaacaccctcatattgtacactccacagaccattgtaatgcagttgtttacacattcctgtttcatattcatatttaatcatacgtctacctccgaacagacaaaatttttacagtatattcttctgaaaccactgttcctccatgcaaaacgaaaggcactaaccttccagcatcatgcacagatcagtacctttctttttgtgtgtttttatgtcctatctgccccgtcaataccacaggacagtaaattacagaataatcacagcattattccatatcttccagtaatttctcataaatcgggaagcagtcaaatgttgcgaaataatccttcggtgtctcggcacggcggatcatctcgaaacttccatcttcatggagaaggatctcagaagatttcagtttaccattgtagttatatcccatggcaaaaccatgagctcctgtatcatggatcacaagaagatctcccatatcaaccttcggaagatagcggtcaattgcaaacttatcattgttttcgcagagagaacctgtcacatcatacatatgatcacatggctggtcttcttttcccataacagtgatatgatggtatgcgccatacattgccggacgcatcaggtttacagcacacgcatccacaccaatatattctttatgagtatgcttctcatggattgccttagttaccaggcagccatacggtcccatcatgaaacgtcccatctctgtatagattgcaacatcacccattccggccggaacaagtacttcttcgtatactttgcggacaccctcaccgatctctctgatatcattcggagtctgatctggtttgtaagcgattccaacaccaccggaaaggttgataaacttcacatgagcgcctgtctctttctgaagtttcactgccatttcaaacatctctttcgccagcatcggataatactcatttgtcacagtattgcttgcaaggaatgcatggataccgaattcctcggcacctttttccttcaggatcttgaatgcttcaaaaatctgctctgttgtcataccatatttggcatctccggggttgtccataatatcgttgctgattttaaacactccgcccggattataacgacagctgatcaccttcggaatatatcctactgctctttctacactctcgatatgtgtaatatcatcaagattgatgattccgccgatttcatttgcatatttgaattcttcttccggtgtatcattggaagaaaacatgatatctccctctttgcatccgattgctttggacatcatcagctctgtcatggaagaacagtcacagccgcagccatactcctgaaggatctggatcagaaatggatttggagttgccttcacagcaaagaattctttgaagcctttattccatgcaaatgcttctttcactgcctttgcattctcgcggatacctttttcatcataaagatggaaaggtgtaggaaactgcgcagtgatttcctgaagtttatccagggtgacaaatggtacttttttcataataatcttttctcctcttacttcttgtgtatatgtgtatataaatgatcctgacagtactcgtagtttccgttacatttagaacagaaacggaattccagattcggatcatctttctctgtacggccacagactgcacatttgtgcttcgtcacttcccctgacttgctgccacccgggaagggaacggtcttactttctcccattgctctcttaaactgatttctgcgatggatttccttcggattgtatctgttaagatttcttgtaccaaggaagaaaatgataaagttcagtaaggatgcgatgatcggcaatgccataaaccatgctcctcccataaaatatctgacaatatcatataccacaagagcagcatatacaatcgccatccacttcatcttgatcgggattacaaagtacagtaaaaccttcatatccggatatgtcagcgcatatgccagaaaaatagataaactgatataatacgttgaaaactgtgatccattcagataagcatctaacactccacctgtgataaaatacaaaataaacgcagaaattactgtaaaaatcattccagataaaatatatacagtaaatctgaatgatccccatgtacgttccagcgatgcactgatcggataataaaagaacaatatcgcaatcacaaaccataaagcagatgacgtactcggcggataaataatccatgtaacaagtctccatatctgaccatgcaggatttcagagatattcaaactcaacatggaaagagcccccggattaatatacatcaatgcatatcccagtacataacttacaataatataaattgtaagattctcaatcccgcgatttccaaattttcgttccagtttgtcaataaatttcataaatctccttttctcacaaaatgctattcgttctttcgttacagcggatatccacaatctgctttctctgcgtaattctgcaccgaataactgcttctcagttcagctgcaaaatcagaaaaacttcttcctggaaagaaatatcgctgcaatgatacttgccactacagaaaggatgataacgataagaaatccccatggtgtcctggaaaacggcattcctgcagcactcaggttcataccatacgcactgaaaacaatagtcggaatactcataacaatggtaataacagccagaaccttcatgacaatgttcaggttattggaaataactgacgcaaaagttcccatcatactgctgaggataccgctgtaaatattagccatctcgatagcctgcttgttctcaatgataacatcctccagaagctctgtatcctccggatatttcttgatactctccaccttcagaagtttctccagaaccatctcattggaacgcagagatgtggtaaagtataccagtgatttctccagttccagaagttccatcaattcctgatttcttgtagacagatgaagtttctcctcaatctgctcgctcttcttatctataatacgcagatatctcagatacatgctggcattacggtacaaaatctgcagaataaatctggttttcatataggtaaaaaagtttcttaccctgccttccataaatcttgtcagaacctgtgtgtcttccagacatacagtaaagatcatcttctgagtcacgataataccaagaggaatggtcacataccagtccttctcgttacgttcttcaatcgcaggtacatctgcaaggataagggtataattgtcctccacttctatacgggaacgctcttcctcatccaaaggtgcgcgcaaatcgtccacctctatcccaaactgctcggaaatttcaaaaatttctgttgccgtaggattcgtcagcgcaatccaacagccctcctgtggttcctgtatttcatggatagcgccatcgattgtcttaaaaatccttaccacgatccacacttcccttctttttctcgatttcccctcaatagattgttactgtttactctgttctcagtaacaataaatctgcaactattcagagtttctgcaagagattactgaacagttacgtttactctttattttcacaaagactcaaacatcattataatttgaacatgaatttttgtcaattccaatgctttcggtttacaaaacttttacacttcgctataataaagtagtatttatttataaaagtcccgtaaagtgggggcgtacagattgcgggaatgattttccaaacacgctctaactacagcaactgaatttaggtgaaatatcccgcaaagtggggcgtgcagattgcgggaatgattttccagacacgctctaatacaataacaggaaaggatacaaatcatatgagccagtcatcatttggaaataaatttaaggtaaccacctggggggaatcccacggaaaagctctcggagctgtgatagacggatgcccggcaggccttcctctctgtgaagaggacattcagaaattcctcgacagaagaaaacccggacagagcagatacaccaccgcccgtaaagagggagatctggtagaaatcctctcaggtgtctttgagggcaaaaccaccggaactccaatttctctgatggtaagaaatacagatcagcgctccagagactacggaaatatcgcatactcctatcgtcccggacatgcagactatacttttgaccaaaaatacggattccgcgactacagaggcggtggacgttcttcagggcgggaaaccatcggaagagttgcagcaggtgccattgcttctaaaatattagaagaacttggcatttcaatctgcacctataccagatctatcggacctgttgaaattgcttcttttaataaagaagaaatccatcagaatgcattttatatgccggacgcacaggcagcagtgaaggccggtgaatatctggaagaatgtatgaagaatcaggacagtgcaggcggcgtgatcgaatgtcgtattaccggaacacctgccggacttggcgagccagtctttgacaagctcagtgctcttcttgcccacgccctgatgtccatcggtgcagtcaaggctgttgaaatcggtgacggcattgcagtgacttcctcaaacggttccactgacaatgatggattcacagtcaaagacggtgaaatcatcaaaacctccaaccacgcaggcggaatcatgggaggaatcagtgacggcagtgaaatcatacttcgtgcccatatcaaaccaaccccatccatcagccagccgcagcagaccgtaaccaaagataaagaacctctttctctggaaatccatggccgacatgatccggtcattgtcccaagagcagtggttgtggtagaatctatggcagcaatcacactggcggatgcgctctttgtcaatatgagttcccagatggataaggttcgggatttttatcggaaataattccaattaatccacgcaaaaataccttcacttgaattctgagctgatctcagtttcaaatgaaggtattttattatctgcctatattgctgattctatgtaacgaatctgttattcttccggaaccggccagattctgatacagtttggctctgtaatcttaatcggcttgccgttcatcacaataatattcttctcataatccactgtaaaagtagtcagtgtattacttgcatgattagccagcaccagatgcttatcatccggtaaaagtaccagatctttcggatattcaccactgatcggaagtgtaaacttccttgtcagcataccagtctcctcatcacgctcaaacatagaaactgtatcctcacctgctgttgtacagaaaagatgcttgccatcatttgcaagagaaagaccggacgctgcattatgtgtatcatgaacatccttcttcgcacttgtctcaatcgtctggatcagttcaaacgccggaaccttaccgcttccatcatatttgtaagccctgatctcattactgagttcaaagagaatataagcaaacttaccatcatcgctaaaacgaatgatacgtgggccgctctctctcggacatctcaggatgtctaccagttccagcttattgcgcaatttgttgacacggtaaatcttcacctgatcaattccgttatctactgcacagagatatttattatccggagtcggacgaacacagttcacatggggacggaagttacgctctgcaacacttccgagtcctgtatggaatacgccatccatcaggcttccaagtctgccgtccttatgagtatgtacaacagtcaccttaccgtcatgatatccggcaacataaagatacttaccgtcaacatctgtagaaaggaaacagcctctcattccatcaatatttacactgttgatacgtgacagatcaccatttttatcacgtttaaatactgcaacaccctcatcctcgatagaataaagatacttaccattctttgaaacagccatgtgggatgcattacttacttcaacactgctgcgttctgtaagagtgccattctcaacatcaacatcataaacatggattccctgtctggaagagccatgtgtataagagcccacataagctacatatttcttttcactcataatgcttttttcctcctgctgtcctgaagtttatttatcatcgctcactctgttcccgtctgctgtcagcgagcaataatattttcgtcccgatattgccggacgatgtcatacgataaggtgattatagcacatttccctaatcagaacaagattacggaactcagttttatgtattttttccagttcatgggttactgtcgttactgttcacatacaagccaaaattctattgccgcaggcaatctggaatgaattttggctaagttctataccggataagcgctctgctgtttatttggtaaaataatttctgacagcctccagtgtctggtctatgatctcatctgtatgggcaacagataaaaacattgcctcaaactgtgacggagccatatggattccctgcgcaagcattcccttgaaatattcagagaaagcttttgtatctgaagatttggctgatgtataatccacaacctcctgctctgtaaagaacaggcttcccagggaagatacgtgattgatatggtaaggcagatttttctctgccaggattttcttcataccgccatagagacgttttcctttttcctccagatctttatagatttcctggtgttcatagagatattttaactgtgtcagtcctgctgccattgcaataggatttccgcttaaggtaccggcctggtaaacctttcccacaggggaaaccagttccataatctctctgcgtccgccgtatgcgcctactggcatacctgcaccgatgatcttaccataggtaaccagatcaggggtcacgccaaaatattctgcagcaccgccaaaagccagacggaaaccagtgataacctcgtcaaagatcagaagggcgccgtactcatcgcagagctttctcagaccttccaggaacccctttttcggaggaaccacacccatattggcgcctacagcttccacgataacagcagcagtctgtccgtcagcctgctccatcagtgcacgtacactgtccagatcattataaacagcagtcatggtatcctctgtgcatcccttaggcacaccggcactgtccggaacaccgcttgtcatcacaccggagcctgcacttaccagcatggcatcactgtgtccatgatagcatcctgcaaatttaatgatcttattctttcctgtaaatcctctggcaacacggactgcactcataacagcctctgtaccggaatttaccatacgcaccatatccacatgtggaatatggtcacagatgaattcagccatctccacttcgattgcagttgcacatccgaagctgaggcccttttcacatgccttcagtacactttcttttacttccggaaaattatgacccagaatcataggtccccaggaatcgatataatccacatattcttttccatcaacatcataaatatggcatccgtctgcgcggtcgataaatctcggtgcaatgccgattgcgccataggcacgtacaggactgtttactcctcccggaatcacctttaccgctctgtcaaataattcttctgataaacccatcagccgattctcccttcatccatgcattttgcaagttcttttgcataataagtaagatagatctgggcacctgcacggtatgcactgactgccatctcacacataatacgttcttcatcgatccatcccatctttgcagctgctttcaccattgcatattcaccgcttacactgtatgttgcaaccggcacatttacagcctttgatacctcagagaccatatccagataagacatggcaggttttaccataatgatatctgcgccctcttccacatccgtaagagcttccttcattccttctcttctgttatggaaatccatctggtagctctttctgtcaccaaaagacggtgcagaacctgctgcatcacggaatggtccgtagaaagcagatgcatattttactgcataggacatgatcggtgctccataatgtccgttcgcatcaagagcctcacggatagcacgtacacgtccgtccatcatatcagagggagctaccatatctgcgcctgcctctacatgggaaacagctgtcttagccagtaattccagtgttgcatcattatttacatcatgaccgcagagcactccgcagtgtccgtgtgaagtgtactcacacatacatacatctgtgatatagtacatgtccgggaactgtttctttgcttctctcagggccttctgtacgattccgttggggtcgtacgcaccgcttcccacctcatccttatgatccgggataccgaacagcataatgctgtttactcctgcattctgcagacgttccagttcaaaaggaagacggtctacactgtagcggaactgtccttccatagaagggatctcttcttcgattcctgttccctcttttacaaataagggatagataagggaagacttatccattcttgtctctcttaccatttttcttaaattttcactgcctcttaatcttcttggtctctgaattaaatccatgtctttttgctccttttatcaacaattctcataactgttccattttttgcagaatagttatcagttttcctgtttcatctcttccacaagctctatgagactttcgatggtagccttctttgccatgcaggtctgcataccataagcatctgctgcagctttggtctgttttccgatacaggcagcttttaccttcgtatagtccagtccctttgtgccttccacaaagccctttacagtggatgcactggtaaatactacacagtccacacttcctgtctccagttctttcttctcatcgatcagtctgctcttctcataacgagtagtgtaggttgcaatatcatccacctgtgcccctgtctgctccagcaattctgtcagctttttatttccggcttcggctcttgggatcagaattttttcatttccctgaagttcttttgcaagctctgctccaagagtatctccgtcatacacacctggcacaaaatcagccagcaggtgatgctctttcagctttttcttcgttccttcaccgatcactgcgatcttcgcctgtcccaggctgcgcacatccatctcttttctgtccatctcgtcaaaaaagatctccacacctgcagggcttgtaaaaatgatccactgataagtatccagtttctcaaatgcctcatacagtctgccattatcctcaacaggtactgtacagatagacggcagctccagaacctcggcgcctttctgacggagaagatctgctgtctttgaaatatgctgtcttggtcttgtgaccagaaccttccagcctgccagaggaagcttctcataccaggcaaatttgtcagccagagaacatacctttcccacaacaataatggcaggtgtctctatcccctgtctgtccacctcttctttgagggtacctacagtagcaaccacccgcttctgtcctgctgttgttcctttctgaagaactgctgccggcatatccggatccattccacctgcaagaagccctttgcagatatcctccagtgctgcaattcccattagaaacaccagtgttccctttgtccgggtcagtgctttaaaatctatatcatactcctgccctgcgcgtttatgtcctgtaataatatgtaaggacgaacagaaatccctgtgtgtcacaggaatcccattataagcaggaacagaaatgggagatgtcactccgggtataatctcataagggattccattctcagaaagaagttccagttcctccccgcctcttccaaagagaaagggatctccacctttaagtcttactactttatttcctttttcagcttcttccagaagaaccttattaatatcctcctgcaccattgtatggtgatttgctcttttacctacattaatcagtctggcatgctccgggatctttgccagaaccccttcgcctaccagactgtcatatactaccacatctgcctgctgcagaaccgctgcgccctttaatgtaaaaagcccgatatcacccggtcccgcaccaaccagccaaaccttgccagctgccatgtttcttctcctttttgcgtcacaagaattttctttttataaatttttttatcttccctcacagtcagatttcaattgctttgcaagtgcaattcccagcttctctccatcctctgctgcacctctgatctgacctgtaagccactttcctgtagcttcactgtaatataaaccgcggataaagatctcatctccgtccacctctgcaaatgcagctacaggcgaagaacatcctccgtccagatattttacatatgcgcgctctgcagctcctgcaagccaggcatccctgtcacagtatccgtccagatacccataatcctcacctttgcgtccctgcacagccagaatcccctgacctgctgaaggaatcatctcatccggtgtaaaatatctgctgatcctgctttccagtcccagtcgtttcaggcctgccgctgccagaatcagcccggaatactctccttcatccagcttgcgaagccttgtctgcagatttccacggatactctttacctccatctcaggatacagcttctctaactgaagagttctccttaagctggaacatcccagaggtttatccggatccagctccgccactccctcaggaagcaccagtacatctcttggatcctcacgctttgaaaaggccagaagcggaagctcttttggaacctccataggcatatccttaagactgtgtacagacagattgcttttaccatccagcaatgccctgtccagttcttttacaaacagtccttttccgcccaccttatccagggtacgatccagaataatatctcctgtcgttttcatagtcaggatatttactgttatttcagagccggcattttcttcacggtttttctgttctatgtagctttttaccatctcactctggagaactgccagcttactctctctacttccaatgatcacctcagtcatcattttcctcctcattatcatcttcctgcgcaactctctccagggcattctgaatctcttctcttatcctgcgcgcttttttatggtccagaccactggctgtaattcccactaccagtccctcttccatataaattcccgggaaataaaaatcgcactgctccctgtcactggctacattaacataaacgccttcctgcctgcagatcctgtggatctcatcatttaactttctgtcattggtagctgcgatcaccatatatgccatcgcaaaatctgtacgcttcaccggacgtgtgatcagctctacatagccggctttgctaagctccatcatctccatggtgaccttcggagcaatgactctgatatttctggtgaatgataaaagggttttcactcgacgggttgcaatgtttccgccgcctacaaccacgatattcttatctgataagtctataaacattggaaaatacggcttattcttcatatattttctccagtcctgccacacactcaaggaaaatctcctgattcagactgtcacgcagaccaaagatcagtttatttactacttttcctgctgccgtatccactgcatggaccagattctgcctgtcatcctcttccataggtgttttctttaatatctttgcaatccttaaattcaggtcattgactgcctcatctttaatatcctgaattcttgggatcaggtctcttccatccagccattggaaaaattcatccatctgctctcttacgatcgcgcctgctgcctccagattttcctgaagttctgcaggaacttcctctatacggaagctgtccatgtcataaagtgtgaccccctggagctttccaacagatggctctatatctctgggaactgccagatcgatcaggatcaggtcatcctttgtccggattccctggaataattcttctcttaatgtgaaattcgggcttgcagttgcactcactacaaggtcacactgcggcacatactccattctgtcaccgtaattaatgcgcttacagcccagcggaatattcacaactccgcttctgtactgacgaatggtcactgtcacatctgcacctgcctcctgcaaggcctgagcagctaccttacccatctcgccgttaccgataaccatacagatcttatccctgagagaataccccttctctgccagaaatccaatggcctgatggatcactgacggatttccatgggaaaaaggaacctctgtcttaatcctctttcctgctgtggcagccattctgaacagaacctccagaacaccatctgccgcaaaattctctcttgccagattcagggcatccttcacctgtgtaaggatctgatcctcccctatgatctgtgatttcagaccactggtaagataaaaaagatgctcaactgcctcctgatccttacgctctacaaaatattttctgtaagaatcctcagtgattccctttatcctgcagaggcagtcataaagacagacatccacctcatcatccacacttgcccagacctccaggcggttacaggtggacaggatcacgcatccatatattccattttgattttttattttttccattgcttcaccggcatttttctttgtaaatgcaaatttcgcacgaatatccaccggtgccatattatggtcaattccaatcatggaaatactcataatttctaactctccttcgtatttcaccattcctcattcatttcatatcaaatcaaatatcccactggcaacagggtatttgatttgatatgatatccggacagcaaaaaaacgctgtcagaaatatcataatcatttcctgttaagatgtcaattgcaaatacggaaaaagctcagcattagagtaaaggatgttactgtgaacggagtgaacagtaactaaaggataacgtgacaagacctcattaccgttcgttctgcatccggtaatgaggtctgaatattctgtgttcactgtttgtctattctcatcagcaccttacatttctttctgtaacaggcgattccatattttatgattgtatgaatcccttcctgctctaacgcctcagtatatctgatatctataatctgctgaagtgctttttcgcactctccctgaagatttccgtcatctgcatattttacttcgatcacaattcccacatcttcatcttctatacggatcagaatatccccgaatccgtctcctgattcccgatttgacattactgaccagttctctttgaatcccagaataccaagcagcaatccatgatagaaattttctttcgttggtttccgggcaaaggtatctcttatgctgatcgtttttttcatatattctgtaaaaatcaactctactttttccggatttttgttcagcagtgcatcacataaatcgctgactgtttttccatcgtcctttacattttctttaaacattttcagaatatgattggtgataatatttcggatttctctgttgggaatgaccagattatacctgttgccactggattcccctctctgtgtcagatatcctgtcataaaaagtgtgctccacagattgtctatggaagaatataattccttataggtaagctcagaattaatttctttctggacaatccctccatttaccagctgttccagttccattctggtcagcttctgtggttttcccacactgtcaatgaaatggctgatcacactgtttccacttgtattcgcccagtaattcttcggttccagcccgggatctgccagatgatcgctgcagaaattgatcacatcccatggacaataaacatccacatttccaaaccggtagccgtcataccactctttcactgtctcataatatttttcctgtccataataccgtaggagttcctttacttcctcatctgtaaatccaaatgtttcatcaaaactcttatctgtaatggaataaaccttaaagttgttaagacctgtaaaaatgctttcttttgcaatccgcaggcatcctgtcagcactgcgaatttcagactgttgttggtttttaatgcgttctcaaataaattacggatcagcaataccatttcatcataatagccattttcatttgcctttgccagaggtacgtcatactcatcgatcagaacaattactttgctgccatagtgcttttccagcaattctgtcagttcacggatactgtacaccagagaatcgtttgtcatttcttttttctttaactgtgtcagtaattcgtgatctgtttcatcaagctctgtgctgtctgaaagtacggatagcctgcgggcttcttcattgattgtttttataagaaatctgcgggcttcctcatatgtggcaccattgattcccttcagactgacagaaaccaccggaaatttcccctgatattcctcacataattcctgattatctgaaatcctcagcccatcaaacaaagtcttatcttttccaatctcaaaaaaactctggagcatactcatattcagggattttccgaaacgtctcggacgggtaaacaggtttacttcaccccatcttgtaagcaactgttcaatcagtcgtgtcttatctatataatagaaatcttcctgccgcaatttttcaaaattctcaattccaattggaagtttttttaatcctgccatcttatatccccttccatttataaagcataccttattattgttatccgtcttattacttttcataatagcatgaatcctactgtaattccagaaaataatgcaacctgttactatcgcaagtgacagtggcaagcgaagtaaaatatgtaataatatgattgagatacttgcagaaaatattaacagaaatggagggtgatgaaaattatgaagatattgaagaaagcaggagggattctccttgtaataatcggaatattcttttttgtatctgctttaaagatgatctttgtggataaccccaaaacaaaagcagctctgaaagacgcagtttacgttgatgcagcagatacgatcgacccggaaaacgatggaaagacagtcattgtatgcggcacatttgagctgactgaaccggcacatgatgatgagcttggactggactttgacagcatccgcatttcaagttcaaaacagacaatgaaattaacaaaatcttcttccaaaaagaaggaggcaatgactgacgacgaaaagaaatatggcgttctggaatggaattcatctttcagcagcatgccggtatcaggccaggggaaaattggaaattatgcactttcgcaggattttattgatgatattatgctgaccaaaacctgggaagattacgacaaggcagcattatcatctgccggttatacatatgtaccggataacacctatacacagaagcattttatagaaccatcgaaccagactacacgttcacataaagaatatgatgttcgttattattattctgctgctgatttcgaaacagggcaaaccgtaactgctatcggcatacaggacggacagactctcaaatccgcacccggaatcacagagaatctgatgaaaaataaacttgaccgcgatgaagtgatcaaacagggcggcaccccaggtgtaggagcccagatcttttcagttgtttcctcattgctgttaatattgggagggttccttcttattatattatgagaaataaatctatagcaatcctcttaaatgcattatttacgaggattgctataaaaagaggatattacttttcaattctaagcatgcgatatccaatgccaatatgtgtctggatgtattgcactccatttttctcaggctccagtttttttcgcaatgttgccataaaaactctaagagaagcaacgtcattatccgaacatcgtccccaaatctgctgggtaatataggtatgtgtcaatacctttcccacattgcgggacaaaaggcagagcagcttatattctataggtgtcagatgcaattcctctcccttcagatatgtacagcctgccgtatagtctatctttaatccaccattctcaaaaacagagctttctatctgctctccgctctgcataaccgcaagtctcctctgggtgacacggatacgcgcaagtaattcctcaacagagaacggtttcgtaatataatcatccgctcctgcatccagcgcctctattttatctgtgtcctcacttctggcgctgatcacaataatcggcatattcgaccaggtacggattttttttatcacttctaccccttccatatcaggaagccccagatccagaagaacaatatccggattgtgggacgaagcttccagaatggctgaaaatccgttttctgcagccagatatttatagtcatgtgtttttaatgtagtaacgatcagattgcgtatgggtctgtcatcctcaaccaccagaattaatgttttattcatttaatgtcacctcgcttaagggtaaagtaaaagtaaaattgcatccatgaggatcatgatctgtcaaaaccagggttccttcatgtgcttctataatagagtggcaaagtgccagtccaagtcccagacttcggtgactatccgcaactgttgttttccctgtataaaacatctcaaaaatatgtgttttcatttcttccggaattcccgggccattatcttccacacttatctgcgcttttccatctgttttcgttccccgaatgcagatcacagaacccggtggtgtatattttattgcattgtcaactaaatttaccagaacctgcataataagacgtacatccatacgtgcaagaacaagttcttcgcagtctgtcacaattttataatcatcatgtttccggctgatatgcctcagggattctgcaatcacctcatccagaagctggtctgtaaatttaaatttcagtcttccgtcattcagtctggtaatggaaagcagattctccacaactccgatcagccattcagaatcatcatagatatcgctataaatctgatgttttgtagcttcgtccagacggtcgctattgccaagcagcatatctgcattaccggaaatggagcaaagcggcgtacgaagatcatgcgaaatcgcccgaagaagatctgcccgcaactgttcatttttggccataactgcatttttttctttttctaatgcatttttcgcattttccattgcaagcgcacattcatttattacagacaacaggatactgtattcaaaagtatccagtgtttctttttgcaatggtatcccgatcacaccgtaaacattatccccgctccggattgccagatataaacatttagcctgaggaaaatggtgtgtggacgcaccggcatgctgtctgttttcacagacccatctggctatctgctgctcttctggtatcaaaaaatcttctgtgtcctctttttccccggaaaaaagctttccctctgataaagttccgttttctactacatatgctgtaatattgcggtttaataaacggagaagctgtgtacaggtgacatcaagaatctctgttttcccttttgcattttgcagcagacggtctgtatcgaacagaatctgtgtacgaaaggcaagctgtgtagacagctttgcatgtgttttcagctttgctgcaagtgctcccgtaagtacggatgaaataagcattatgaaaaatgtcaccggataacccaccgcataggttttaaaagacatccttggttctgtcagaaaaaaacaaaataaaaatacacttaaaaaagagcctgccacactgcaaagatagccatctgtcacaatcgaagtaagcaaaattcccagaatatatatggttacaatattcgtatccgtaaaattcagtttctgaaacaacagaccaattaaagtgcataccgcaaatataaataccgtcagaaaataatcctttgcagacggtttttccatagaccatgtaaatgaccgtttttgatgattcacattttttaaactcatcctgtcccccaccttttttactgttttgaaaattatatcatggggctgtgttgtggtcaaaagtctttttttactatatgcggaagcatttttgaagagctctgtattctcccagcaccagtaatttactattctcttccaaatacgtatccggagaaattgcaatattaaattctccttcattttttactgccagaatattaatattgtaacgctttctgatatccagtccgcctacagtttttccagtccattcctccggcacttctacctcaaaaatcgcatgggaagcatccacctccatataatcaaggatatgatcatctgtgtaacggatagatgcccattttgcaacctgcttttccggataaaccaccttatctgcaccattgcgtaaaagaaatttttcctggacatcacgttcagctctggatattaccagttttgctcccagttctttcagaagggaagtggtctcaagagaattctgaaagcttcctccaatagtcacaaaacagatatcgtagtttccaattccaagggattgtaaaaattcagcattggtactgtccccgatctgggcgttagtcacaaacggaagcactttgtccaccctttcttcattccagtcaactgccataatttcatgcccaagctgattcagctgcatggcaatatgtcttccaaatcttccaagtccaataatcaatacattcttcatgatattacttttctccttctcatccaactgtgattttctccagaggaagctttgcatttcccttatttcttcctgagaatactgcataaatcagggtcaggccgcctacgcgtcccagatacatcagtatgatcagcacaacttgtgaaaaaacatgaagtcccggtgtgactcccaaggtcagacctaccgtgcccacagctgaagctgcttcatacagacaatccaaaaggggaagaccttcgtatacgctgattgcaacacctccacaaaagaacaatgtaaaatacagcatggctattgtggctgcattttttatcacatgatactccagtctccgtccaaaagcccctgcattttcctgactgcgaaaggttgcaattgcattcagaatcagtaccgtaaaagtggttgttttcattcctcctgctgtagaacccggcgaaccaccaatcagcattaacagtatcataaccgctttggatgcctcgctcatctctgaaatgtctatggtattaaagccggcagttcttgtagttaccgattgaaacatggcagctaacaggcgttctcctgcaggcaggtttttcagatcacaggcaaagaaaaaaactgccggaaaaataatcaggcatacagtagtcataagaataatcttgctttgcatgcggtaacgtttaaaattcattttattcctataaatatcatcccaggtaagaaaaccaattccccctgtgatgatcagcagcataattaccacatttataaggatatttccggaatagcccgtcagagacggaaaagcattatctgctgttcccagaatgtcaaatcctgcattacaaaaagcagaaacagaatgaaaggctgccatccagattccctttaagccataatccgatacaaaaaccggcaacaataacatagctcctgctgcttcaatcaaaaaagtcccctttaaaatgaaccttgtcaatctgacgattcctccaactttaggtgctgaaattgcatcctgcattgtacttctttgcatgagagatatttttttccctgaaagaagcgaaaccgctgccgctacggttactactccaaatccacctatttgtataagcgcaagaataaccgtctgtccgaacacagaccagtaacttccgctgtcctttactacaagccctgtaacgcatactgccgaagtggctgtaaaaagtgcctcatgaaatggcgtcggcactttgtccaaagaggaaaccggaagcatcagtaaaatacttcccaaaaggatcacacctgcaaatcccagaataatcagctgaaaagacgtcaggtgttttttcttacacattttttccggcataaataatcataactccttactaatgattctatagcaatatcttcataatgcgttttattatatacaattgctttcaaagatagtataaaagtctatgattccgtattaagattgtataaagacagtcaatacttttacacaagacgtatcagcatatgtcataatcttattgatgtagaactgtctgtttatcatagaaatcaccttcatggttccatgatacccgcaatcgcatcaaaaaataacaggtattgtgatttataaccgcaatacctgttattttgctacttgtctgattcgattaaacacacactaattcatctgacatttctctctgagagtgtcataaattttctttgtttctgattcatctgcgccatttaccaccaatatttttccgcctatatccataactacatatgagtggcaggatgcatgggtgtagcggatataatctccataaatatcatttctgaaatttcccataccatacttcaggtttcccataccatttgttctgcaatcattcccattttgaaataaattttctttgtatgagatactgtcaatctgctcataatccactgtataatcactccatccctgtgcctcaacagtaaaatcattatcatggaaactgatatcaataccaccccagaacaaagtccatatagtaaatattacgacaaaaactgatacgattgtcttcttgttatactggatttttaatttttctccggctgccatttttttcttataaaaaagataagaataaagaatgctgacaattgcagcagccataatgctcacaatatacaaaaccaaagcagcaatgctttctccaaaaaggccgcaaagcatacataagacacctgatgccacccataattttccactgaatctatgagttgcactccagttttcttcatcctgcaatgtccatacaaccctgattcctatggtgttattctgtttcacctttggcaaataatttcctatgatcataaacagtaatcctgttccaaagtaaattactgccataaacagattctcactattcgtatccatactgatcagtcttgccataccattatagattaacgcggtaacaggtatcatccatatgaccatccctataaccttgctgctctgctgtctgttcctgttgtcataaaagatgattgtcaccagtatacaatctgtcactacaaaaaacacgtttatccatatgctctgcgccatcgtaaaacccaccaaaatccctgcaagcattaccagtacagaacagatcaatgtacctttatattttttaatcatttccttcataatccgataccccctttaagtctgtgatccacaacataacatcctccaatacagaagtatttagttcgtaataaataaattttccttcccttttgctcctgatcagatcagcatcctttaatattgccagatgtctggatatagacgcccccgtcactgaaaaatgttcacatatctctcctgctgaaagccgtccgccctttaacaaatttagaatctcacgtcgtattggatctgccagtgctttcaaagtatcctgtaatcccaaaagttaatcacagcctttcatttaacatttaacctaattgttaaatataatatagtataaagaatatcatatgtcaagtgcactctcttattgcttattacttattactttttgcaattttcgaagaaggggactttcatcctgcccggaaggctttttatgttataggaacattacggaataatttcctataacataaaaaataagcagtcacgcacggtaaggtgcatgactgctgtagttttcagacaaatttaaaagcaaaagcagaaattttctattctgtatcacggtgaatattttcttactcttaacggaatcccattctgagcagccaggattttactctgctctactttttcctcgccgatcacatctacaactgtgaagcgtacatcatcaagatactgcttgcagtctcttgcaaatttcagcatggcgtcaaaggacttctcgccgtatgctggacggactacttcattgtaggaagctgcatccggcatattcaggctgatggatatactgtctacagcctgacagatttcttctgcagtagaacgtttgtgaatcagatcagataagccgttggtattcagcctgatccggaatgggtatctttccctgatatatttgcttactgctataaggttctcaagagccatggtcggttctccgtatccgcagaaaaccacttcattacagtctgaaaaatcaaactcatcaatggctttgtaaatctcttccaatgcaggttcatgttcaaaccagagattggatgcctcaccgatggcatcctctgtatttcggatgcagaaagtgcatctgcatggacatttattggtaatgttaaaatacacctgatttttatatctgtatatgatatctgttgtcattttatattctcctcagtgtcaagcggataaaatcatccacttcgctacttgatccggttaaattcagttgtttcatttttcgtattatttcgcaatattcgtcttaaatccgattttatcaagtgcagtaccgatgatcacaaacataatggcacttccacctgactgtacaatacttccgctgacagaagtaaagaaggatgctgtaaatccaaacataattccttctgcaatatagtatcctgttgctgagatggcgaatgcaaggaataatgcaactacatttctctttgtgaccagctttgttcctttagaagaaaacggaagacagatcagcattttgataattatggttgcaggcgcccatacaggtgctgtcagaagatctgccaggccacctccgatcgctcctgccgcacatgcgtaaggtagtggcagaaatgctgctgccagatagatcatagtatcgcccagatgtacatatcctccgttcacccctaccggaatgtggaagatataagctgtcattaaagtagtcagtgctgccattaccgctgtggctgtgatccttttcactgtatcggctgttttgatgttttcttttgctgttaattcagacataatatgatccctcctgttatatattttacttaactatccagcatttggtatctatgatttcctgttttatatctgtgtcagtatccccagatatttttcaaagcagactccgtcatttctgtcagttccttcttccactgcatcgtgaatagctccgctcagaaattcaacagccctctccacacatgctttcatggggattcctctcaccatccctgcgctcaggacagatgccagaagatctcctgttccggaataactgccgccctcttttacagaaaaacaccagtctgctttttctttctccagaaccagatttcccattcgtgctctgccgtcactgccggacacctctactcctgtgatcacaactgattccagcccaaaacgcagagtcagatctcttccagatttttcaattttcttaagcaactgtgtttcttccatatcagaaagtgctttcattctttctttcatcccactttccccatacagaagaagaagtgcctctgtcaggttcggcgtaatcactgtagcttctctgaccagagtccgcattttttcacagagagtctctgaataggttttgtatgtttcccctctgtctcccataaccggatcaaccaggatatgtgttccctctgtacagaacatatctacaaatttcaggatcagatccacctgtctggcatctcccagaaatcctgtataaacaccatccggtgtaaatcccgtttttttccactcatccatgatcagctccatccggtctgtataatcatcccagaaataagatccatatcctgtctgattactcaatattgcggtgggcagcggacaagcctggactcccatggcggaaattacaggaatcgctgctgtaagagagcatttccccagaccggacagatcatgaattactgcaatttttttcaattttttattcctcttgctttcttttatgctttgtattaatatagcatcacagtggatatatgaatataaccagatttaatgtttttttaagggtcagtttatttttaaccctatagcaattcaagaatgccatcagcatgtttgaaggatcggagttttacatatggaattgattttagataagaataaaaaaaaggagcacctgtatctggaggtgttccactattacagggaactgatcatggagaaaaagctccctcccggaagcaggatgccctctcttcgaaaatgttcacaggagctgaagctgagccgcaccaccattgaaaatgcctatctgcagctggctgcggagggatatattatttccaaagcccagagcggatactatgtgacagatatagcggacagacaacacacatctgtcagaaaaacagagaaacatgctcagacaccttgccggtttgattttgcttcttcaggagtagatcgggagagtttccgttttgacctttggagacgttatatcaaaagcgctcttcgccaggatgaaagattactgtcttatggagagcctcagggtgaggctgacctgagagatacacttgccgattatgtgagagaacgtagaaacgtgctatgtagtggggaggatattgtgatcggtgcaggtattcagagtcttttgcacatcctctgcccgctccttgagcaacgccagactgtttcttttcccaatccttcctttgtacagggaagcactgtgtttcatgactatggatttcaggtagattacaggaataaggactgtgatattatttatgtttctcctgcacatatgacaaaatggggtgatattatgcctgtttccagacgcctggagctggtgaattactctgctgcacatggcagtctggtcattgaggatgattttgaaaatgaatttgtgtatctgcagaagccgaccccttctctttttggtctggcaggcggtcagaatgtggtgtatctgggaaccttttccagacttctgctgccctccatccgtatcagttttatggtcctgcctccggagctgtctgcactgtacagaaaaaaagcagaccaatataatcagacagcatcaaaggcagagcagattgctctgtgccaatttatccgggatggtcacctggcagcacagacccgtaagctgaaacgtctgtattctgtaaagctgaaagcactccgcagtgctgtgcgggaagtatttggaaaagattcccagatccagaccggagccgcaggtaccagcctggccctgactctgtccacaactcttacctggcaggagcttcaaaaaaaggcacagaccaatggtctgcgcctgcagcttctgagagaggctcccggtaagattaccctgatcctctcctgctcctccatgcctgtggcagatttcatcccggcatgtgaactgttaaaaaatattatttaactcagctttcccagctgagattttcaaagccttccttgattgtcgcatcttccatagaggaaatccaaagccgttcaaacggctttgtttcctcactttcgatttttgaattgtgcaacaagttgctgcacaatttcacaattcatttcttacttaacaataatacggagtttaccttcttcttttgttttctggtatctcaatatcctctgttattatcaatcatataaagcaatgcattacagatacatgcggcaacattgcttccgccctttcttcctctggctacaatataaggtacgtctgcctgcatgatcagttccttggactggaccacatttacaaagcctaccggcacaccgatgatcagctcaggatccagcttgccatcctcaatcagttcatagagacgtaccagcgcagtgggggcatttccgatggcaaagatcagcttctttcccatggcagcagccttatccatgctggctgtagctcttgtggttccgttggctttggctgtggcagctacgtcctcatcagagataaagcagaatacttctccgccgtaacgggcaaggactctcttgttgatccctgactctgccatgtgtgtatctgtcacaatgcaggcgccgtctttaatagcagcgattgctttctcaactgcattctcagagaaacagagattctctgcataatcaaagtctgcgcttgtgtgaatacatctctttacgatcagctctgttccgggaaccagctttttgtctccaagttcctctgtgatgatctcaaagctgcgcttctctatatccattggttttacattttccagttctactttcattccttatctcccaaattccataaattcccgtatacaatagttacatctatcactcattatagcaatcctctaaaataatgcatcttaatccagcccatcagagtgtgaaattctgcgtcagatatctttgccgtgcgtcagcacgcctgcagatatcttccttgtctttcacactctgctgaactgtcttaaatgcattatttacgaggattgctatagtttatctggattttcaccatacaatttcggatcagattccctgctccagaatttcatagattttcttcatatccagatgcttcctcagttctgctgccaggatatcatactgggtttctttaaatgctgcaaaatcgattcctgtcatctgagatacatcaattccctttttctcacccagaacacgtacaacagcctctgccacatcctctctgtcaaaaactccatggacataggttccgcagacatttttacagtatgcaccgtctttcttacactctcctgacacctgatcttcaatggatacactgtgtccggcctcgccttttaacacagtttctcccatatggatctcgtaaccctccagttctgcaccggacagtgcctgaagctctccctcgagttccagaaatctgccggaaactctggttctggttttcttttccgcaaaaacagtatccataggaagcagtcccattcctttgatagttcctccggcttccacatgatgagggtcacttaaggtctcacccagcatctgataaccgccacagattccaaaaatgatcttaccctttgcagcttccttcaaaactgcagcttccagaccattagcccgcatccacagtaaatcttccattgtatttttagttcctggcaggataatcatatccggatttttcagttcgctgacatgctgtacatatctcagggaaacgcctggaatactttccagtggattaaaatctgtgaaattggagatccttggcacccggatcaccgcaatatcaataagatccacttcctgttttctgtcaaatctttctgtgaggctgtcctcatcctccacctgaatatccagatatggagccactcccactacagggatatggcttctctcctccagcatctgcactcccggatcaaggatggtcttgtcgccgcggaatttgttgatgatcagaccctttaccatctctctttcatcctcttccagaagctccactgtaccgatcagctgtgcgaaaacaccgcctctgtcaatatctcccaccagaagtaccggtgcctttgccatctttgccattcccatatttacgatatcttctgttttcaaattgatctctgccgggcttcctgctccctcgatcacaatgatatcattttctgatgccagtttatcataagctttcataatatccggcaccagctttttcttatatttaaaatagtctctggcactcatggttcccaggacttctccgtttacgatcacctgggagcctacatcattggtaggcttcagaagaatggggttcatcagcacagaaggcttaattccggctgcctccgcctgcatcacctgagctctgcccatctccagcccctcttctgtaataaaagagttcagtgccatattctgggatttaaagggtgccaccctgtatccatcctgtttaaaaatcctgcaaagccctgctgccagaaggctttttcctgcattggacattgtcccctgcaccataatcgcttttgccattttttgtttccccttttctcctgtataaatacttatgaaagcacttcttccagtacctctatcagcttttcattctgttcatgcagcttcactgccacacggtaatatccttttttcagccccagatagttactgcaatcccggatcaggatcccctttgcaacacatctttcaaagagatcctcaggtccgtaaaagaatatataatttgcttcagaaggatataccgtcagcccaacctgtctcatcttttccttcatccatgcagattccctgaaaatgatctgccgtcctgcttccacatattctgattccttcaatgctgccattcctgcctgctgtgccatggtagacacattccagggctgggtgactgcctccatccggtcaagtactttcctgtccgaacagaatccatagcccagacgcacaccggggatcgcatatcttttggtaaatgccttaagaataaaaagtcccggatatttttccagttttcccttcagcgtatgtttctccggatcttttacaaaatccaggaagcactcatctactaccataaatattccctgcatggcacagatttccaggatttcttccagaaggtcctgaggtatggtaatccctgtaggattattgggattacacaggaaaataatatccggcttttctcttttcagaacatccggataatctttctgtatacagaaatcattttcctctttcagataatatctgctgatctcacagccaacactgaccagtgcctgttcatactccgcaaaggtaggagcaggaagaagggccttctttggattcaatgccctgctgagggaaaaaataaggtctgcggctccattcccgcagatcagatattctttttttgtatattcataatctgcgattgcctctttcagaggtccgcatcctacacggggataatcactcagatcctctacactgtctatgatcgcctgctttacactctgcggtgttcccagcggattacagtttgcagagaaatccagacagtgatcatatttataaacatcaccgccatgtatatgttttgtcatcagttgtctcctgtcttactatacatgttttatattaataactattcagcaatccactattgaaccaacaagctgttatcctgcaagattattacaaaaatcaacttatcagcacactgttaccggaattataaaaagaaacagatgcgcaccgcgcttccgatcagaaggaatatcacagcccccaggatcgctgttgcataaagcagacggttggatcgtctgatatcctccacctccacagatcggattccatctcctatggttggtttctcataaagctttccaaaatagtaagcattgcctgcaagctgtacctccagcgcacctgccattgccgcctctgtctgtgcagagttggggctggcgtgatttcttctgtctctgcggtagatcttcgctgcatttttcacatccatttttacaaatgcagaggctgccaccatcagccatcctgaaagtctggctggaatataattggccacatcatccagctttgcagcgcagcgaccaaaatacagatatttatcattcttatatcccagcatggaatccatggtattgattcccttgtaaagaaacatcagccacactccgccgattgccatataaagcatcggtgctatgacaccgtcagaagcattctctgccacagtctctactgccgcctttgtaaccccctcctctgtcagcgactgggtatcacgacctacgatcatagatactgcataacgggcttcatccaaagttccgtttttcagtctgtcatagactttcatgctctctgttttcagagatttcgttgccagaagctgataacaccagaaggtttccagtgcgaatcccgcccatactgagattccatagagaatatgcagcatcagaaatgggattccaccgcttaacagacagacaaggatcacttccactgtacctgcagccagttcgcccttatctgttttcggaaaaatcttccgaagtattttttccagaaatgcgatcagatttccgatcagacacaccggatgatacagccatctgggatctcctatcataagatcaagtatgaagcctgctgcaagggcaggcatactgtaatataacatatttttaaaactccttgttatgatattccagacatttcatgagaaaagccctgggaatctggggatttccataataatagatatgaggatatcctgccagcaggttactactgctgtgcatacagtcccagcctcttttacttaaaggcttcgctgcatggaaatcacttccacagttctctgaatcaaaatagtggaattcatgggccggaatctcaccaatctcctctgcacttctgctaaaaacaggtttcctggcggttaatgtgatatatccaaatctggtcagtctgggagtacggaaacattttccgggaatcactccgcaggttttccggaacactccgcccatatcctccatctgctcatgaagatacataaagcctccgcattctgccatacatggcatgccctgtttaactgcctgtgcaatctcttctttcatggatgcattgcgttccagtgcctctccatttaattccggataaccgccataaagaagaatcccatccagatctgcaggaagatgttcatcatgaattggcgagaaatcaaccagctctgcccccatttcctgaaggagacgaaaattatcttcataaaagaaacaaaaggcttcatcctttgccactccgatacgcagcttctgtggcagacaatatccatatgtcctgtctttctgtatcagagattccggcacctgcagatcctctgcatttttggcaaatgcaaggatcctgtcgatctccagtgtgtcttccaatattccggccagcttctgcaaacgttccttcagatcagaaatctcctcaggaagcacaagacccagatgacggctctcgatcacacagtcctctacctttggcacatatccaagaacctccacctcaagctgttcttccaccagcttcttcattctgggataaagcatgggagacatctggttaaagatcacgcctttgatatggcttttctctttgtactccataaaacctttgatgtaagctaccagggaaatactcattcctctgctgtttaccacaaggatgaccggagtatctgtggtatctgccaggtcataggcgcttgctttcgtggatattccacccacgccgtcataatagcccataacaccttccatcactgcaatatcgcagtctgctgcattttttccaagcaggtatcgggtagtctcggcatctgtaaaaaaggtgtccagattacgggatttcgtcccgatgactctggaatgaaacatgggatctatataatccggtccgcatttaaaagatgccactttcatttttcgattgaccagtgcctgcagaagtccgcaggtaatcagagttttgccactgccgctggctcctgctgcaagaagtattcttggaatatccatccctgttctcctctgtttctgtcctatattttttcaacaatttcagggcattccaatctattaactgttaatctgtatttccttaactgttaatttgtaatccctgatatctgcatcatttgttattttccgggatcctgaagtgtaataatataaataggattctcgcccatcatcatatgataacgtccgattgcctttgaacgtgccgcacttagctgtacgatctcattctcttcaaatccaaactctttcgctgtttctaatgcttcagatacagtttcaagagtgatacagttgatcacgatccggacctgagggttcttttcaagtaacagcttcacgatctctttcagatttcctgacgagcctccgataaaagcatgggttggtgctggaagatctttcagagcctctggtgcaagtccttccacaatctccagattatccgttgcaaatttcaacttattccggtggatcagttcaactgcatcttcctttttctcgattgcccagacctgtccctgatgagcacgaagtgccatctctactgacagtgagcctgttcctgcgcccacatcatagcagacggaatcagcagtcagccgcagtttggaaagggataccgtacgcacctcttcctttgtcataggcgctttgcctctgataaattcttcatctctgatcccatgcgtctccagacgtgttcctgcattttcatttactgcacagatgacggacaaaggatcacccttatattctgtcagttcgctggcaggctttgcaaaaatcttctcattttcataggacagattttctcccacataaagaagcacatcacccatcccgtattttaccagtttctctgccagaactgctacaccgtctgaagttccgagtatggaaaagactttctctgcataacagatatgtgagataagattacagcctcttccatgtgcactgacaattttggcgtcatcccaggacaatcctatttgggacataaaatatacaactgaggaaatcccacactgaatctctatctctgtattattttgtgctgaactatcccgttcttcctcactcttctctgatccgttctttctctgtactctcagattcgcactgtcctgacacagtacttccagaagttttctggctccactgtagaagcccacatctccggaaaggacaatcacaatattgttatactccggatgtgcatcaatgtaatccctgatctcctggcttctgtattccacaaacacatcctgtcccggacgtttcacagaatccaccatcctcctggcaccgatcagaagatccgcctgatccaggctgttcttaccctggacagtgagaagtttttgacttcccattccaattcctagcaatgtaatatgcggtctgtgggctaaaccgaaatgctctgtaagaaatctcttacattctctcacagacatgccttcctccttcagaggacgcccgatgatcacaggaactgcatcacattccagggcagcatcgatcttatcctgaaatccccctgcttttcctgtatcctttgtgaccagatatctgcagtcatactgtctgagcattgcagcattcagttctctggaaaaaggcccctgcattcctatcagatgttttccctcaaatcccagctctgcacaggctttcatcacattgggcagagaaaggactcttgcataaagacggttctgataatccttcatgcctgtgaagccggccagttccttgcttcctgttgtcagcagtacatttccctgggtctgatccagataatctgcagcagcctgaacactgtccacatatactgccctgtcctcatgttctcctgcttctctcagcaccctgtaatatgctgtctgcgtattatcacaggctgtcctgatatttacagtcacctcagcagcataaggatgggtagcatccagcaccatttccggtttctcctgtaaaaagacctcttccatgtccgctgcatccagtcttccagtctgaacagtgagaaattcattttctgtaagagatttgctgccatattctgtggcaacaaatccctttgtctctatcttatgatctgccagaaaccggcagatctcgtatccttctgttgttcccgcaaaaacaagaactttatacattcctatatcccctcggtgttaccatcttattgttgatttcctttgtctgagaattaccgataaatactgtggtaaacatatccacctgtgtatctctcagttcctttaatgtcattacatgagcttcttcgccttctcttgcaatattggaaactgttccgcagatggtatccggtgatttgtatttcatcatcaaatcacaggctttctgtagataatcatgacgttttttactggacggattgtaaagacatacaacaaaatctgcctgggctgctgccagaagtcttgcctctatcttttcccatggtgtgagaaggtcacttaagctgatcagacagaagtcatggatcagaggtgcacccagaacagcagctccacctgttgcagctgtcacacccgggatgatctccagttctgtttccggataattgacaccaacctcatacatcagacctgccataccgtaaactcctgcatcaccgctgcagatcatggaaacagtcttacctttctttgcctcttcaaaagcaaggacacagcggtccacttcctttttcataggtgtagtcataaactcttttcccggaaaatattccttcaccaggtctacatatacggtatatccgatgattgcatcactttcattcatggcgcggatcgcttttcctgtcatctggtcataagctcccggtccgattccgattacatatattttactcaaaatgtatcctccattccctggcagccactgctgtggtcacaccattttctcctgtttttctctgcagcagcctgccatttccactggcaaggactgcacttctctcacagacattgtccacacctgtgatcttttttacaaaaggtgagggagtaaattctccaggcacctgttttaattcttcttctgtataagtcacaaaaggaatctgccagtcctgtgacaatgacaggattcccttttcttctttcttcagatcgatacttgcaatctgctcaaatgcttctttatgaaatccggatctgtccagcaccttctgcgctgcctctgcgattccacgggcatccttgtctttcctgcagcccatacccagagtcagacatttcggaactacctgtgtggtagaaataaaaggattacaggaagtatgtacagtaactgcaactccgcagtctatattcgtacagtctgtccctgttccatcaaaatcagggcttttctgtgtttcctcttctgatctgtcatccatactgctgacaggattcccatattcgtcacaccggatcagcccctccggcagttcaccgtccgtcggaaactcactgtaaaatccaactttctttcctgccagaagtgcagcagagacttcctttgctgctttcatgttaaagatattgcaattgtttttctttgcaaaaacatctactgcaaaacggtgatgcaggtctgtggctgttgtgaccactggtattgcttccagaatttctgctgtttttagcgccagttcattggcaccgcccagatgtcctgacagaagggaaatgacaaactttccacactcatctacgaccagcaccgcagggtctgacttctttgacgctacataaggcgcaatgctgcggacggcaattccggtggcaccgataaagatcagtgcatctgaatcagaaaatttctctcctgcccatgcagaggtactgatctgaatagaatccggaagatatttactttttttatccagttctgctgtcataccggcagctcccagccccccgcataatctctccccggtctgctgaccggtaaggctgaagcatataagtgcaaccttcactgttatattccttctctttctcctgtttacagtaatctcataaacgatagcaattccttaaggttaccagattctatgagtgatgtgtttttgatttcacagcttcacgaaattctgtggtaaactccggatcatacagcttggaacggtcatagtgtgctgctgcaactgtatctccgatgatcatcagagcagtttttgtaatattattttctgcagccgtttttgccagtgttcccactgtgcagacgaaggtcttctgttccggccaggttgccttatatacaatggctgctggtgtatctgctgtataaccgccttcaataagacgtctgctcagctcttccagcattcctgtacttaagaatacaaccatagttgcctgatgagccgcaaatgactgaatgctttccttggacggaaccggagttctgccttccattcgtgtaatgatcacactctgggaaatgtccggcagagtatattccagattcagggcacttgcagcaccgcagaatgcactgacacccggacagtaatcataagcgatatttttctcatccagaatatccatctgttcacggattgcaccgtaaatacatggatctccggtatgaaggcggacagttgtctttccctctgcttccgccttctcgatcacatggatcacttcctccagtgtcatttttgcactgttgtggatagtgcagatgtcctttgtatattccagaagctttggatttaccagtgatcctgcatagatcaccacatctgcttcctccagatactgttttcctcttactgtgataagatccggtgctcccggacctgctcctacgaaatgtaccataatctatcattctccttattataaatttatttcaactgttcaatactttcacagttgtgagtcaaaatccattaaaaatcgcctttgcgataggatctttactgtgcctcatcattctgtgcattaatcagctttatcagcttctctgcatctgcagtctgccccagatacccataagtattattaaaaatcactgcccccagaaggatctgctcataagatctgtgatttaaataaaactggatcctgtccaggatctctttcatggtcttctgaagtatctgatatttttccagaatgtctattgcttcatctgtagtagatgcattcaggatttcctttgcacactccaacgatgctcctgctcggatcgcattggatgccagcacttccatcctggcatctgcactgtgggaatgggtattcatgatccctgctgcaacttttacaaactttccgatatgagcaatgaaaaggattcccttaactcccatatcaattgccatgtcaatggtctcacctacataattgctgcatttgatatttttttcataagggagatccatatgctcccgcagataatctgccccgtaatttcccggtgttaccagaagatattcttctccctgggaaaaatgctgcttcatctctacattgatactctgtacaagagcagcttcgctcataggttctacaatcccggaagttcccagaatggagattcctcccacaattcccagacgtggattaaaggttttctttgcgatttccacaccttcaggaacggagatgatgattttcagaccaccctcataatcatatttctcagcaatttctgtggcttcacgcaaaatcatggcctttggcacaggattaatagctgcttccccaattttctgggaaagtccggcttttgttacccttcccacaccaacacctccgtcgaggatgattcccggttcttttgttttctgcaccgtggcataaaccagtattccgtttgtagtatccggatcatctcctgcatccttctgaattgcacaggtcacctgatttccttcaatccggatgtctttcagttccagtgtaagcaggattcccttaggagtcatcaaggtgacagccttctgcatgacaccacccagcaggatttctgcagcacccttacatgcagctgctgcgcaggagcctgttgtatagccaaacctcatttttttattgccacgtatcacgtagtaatcttccagtccgtttttcatgacgcctcccttgctgcattattgtcacattctgtctgcagattactccacagcattgctatacataaaaaggagggatttctgtgtgcaacaaaatccctcctgaaagttcttttcccgaaatatcctctggttgccgcagatcatatttcctctctacaatgaaaagcagacagtatctggctgttacagtaacggacttgcgcaggaatttcacctgacttcctgtaatgcttttccagaattatttccgagaatcattatataattttgagcagtaaaagtcaacgcatttcatggttataccgccttgttatactaccttatgcttcagccatttcctactgtggaagcgaagagaaaatacgattccccgcactgtccagtcagtaaacattccaatccatacagccattgggccgaagcctctgaaacggatcagatatacacaaaggcaaaaacggaatgtccacatagtgatacaggatgtgatcatggaaaattttacatctccggctgctctaaggccataagcagggataaatgccagggtccatacaataggtttgacaaccgttatccaggatatcatatggaaacacattcttgcactttccggttccataccacccagctttgtgaccggaatagttaaggcaaacaccaaaagacagcttgcaacaacaatgatttctgcaagaacacttaatttcttaatatagtaaactgcctcatcctttctgcccgctcccagacactgtcctactacagtcatcagaccgattcctacaccgatggctgcaataccgttaaggttctcaaggatattcgtcattgcctgagctgcaatggctaccgttcccaatgtagatacggaagactgtattgccagctttccaagctgaaacatgctgttttctatgccggacgggattcccagagccagaactcttctgatcatttttccatccggacggatctgtctgtaatttctgactacaataggctgtctgtccatacgaagctgccagagtaccactacagcacagaagactctggatgcaagagttgcgatggcagctcctgccactcccatattgaatccccagatcagcgccgcatttccgccgatattaatcacatttgaaataaccgatactgtcattggccctctggtatttccctgggaccggaatatggatgctcccgcatcataaagcgctataaatgggaaggataatgccgtatagaagaaatacacctgagaggcagtcataacatctgattctacttttccgaatatcagttttaacagtggcacacgaaacagcaggcacagagcagtcactgctacagatatggcagtaatgataaataatacctgtcttgctgatttatttgccatttcatgatttttctgacctatgtactgtgaacagaggattgcaccgcctgctgccagcgctgagaacgcctggattaccaatacattgatggaatccaccagagatactgcggatattgcagcagagcctacattgctgaccatcatggtatccacagttcccatcagggaattcagtacctgttcaaaaataaccggtatcaacagggttcggagcattttgtttgtaaaaatatgttgctgttctttcattttttccacctgaatctattttctttttttgattatacgcttaattttctgtgatgcaatagaataaaatgtattttttaacgttttcagggttactgttcacccgccactattctgcgaggtgttttggcatgaatatgccaaaatcccgagacatacaagccaaaattccattgccgcaggcaatctggaatgagttttggctacattactgtgaacagtaatttttcaggaaatctgataattgttcttgttatgttcttcaaaatctgatacagtaaatctgttaaaaataaggcagggcatatcagcccgcaattcttaaatcttatacaaatcaagaaagcagacagatcatatgcaaagaatccttaaatatattatctccgaaaatacaactccggtcacgattctggactttctaaaaaaagaggggttttcccgccacatattaagctcaatgaagaacactcccaacaccatcattctcaatggtgaacgtggtttcggacgatcagtgcttaaaccgcaggatcatctgaccgtcactgttcctgaaaccgaatcaggagaaaacattatccgtacaaagatggatttgaatatcatttatgaagatgaggatatccttgtgataaacaagcctgcagatatgcctgtgcacccttctgcgggaaattatgaaaatactctggcaaatggaatcgcctggtattttgcagaaaaaggagaggattttgtttaccgctgtatcaaccggctggaccgggataccaccggtgctctgatccttgccaaaaatcccctcagcgcagcgattctgtcagttcagatgaaaaaacgtcagattctcaggacttatctcgcacttgtagacgggcttcttcctgactccggaacgatcaacgctcctatcgcacgaatggaaggctccgtgatcaccagggaagtaaatttcggaaccggggagtctgcaataactcattatgaacggctggcggcaggaaaagaatattctctggccgaacttcatctggaaacaggccgcacacaccagatacgtgtgcatatgaaatatatcgggcatcctctgcccggagattatttatataatcctgattaccgtcggataaaccgtcagccccttcattcttatcagttggagtttactcatcctataaccggaaaggtcatgctttttactgctccgcttcctattgattttatttctgccttttatagcaattctctaaaataatacatttatagcaatcccataaattactgcaaacaaaacagttcatcagttttatgtctgatgaactgttttgatatgaatgcatatacattcttatttatttttctcataaatgatcaaaagacctctcagaagaagttcctcgtccagaatgatttctctcttacaatgaggaacgattttctttgccagaccaccggttgccactacagttgccttctcccccagttcctcttcgatcctgtcaatgattccatccagagctgctgcattgctgtaaagaaccccactcttcatacattcgatcgtgtttttcccaatcacatgtcttggcgcatcaatactgattccgctgagctgggaagccctcgcagtaagtgcatccagggaaacccctacacccggaagaatcattcctcctacatactgcttcttactgttgacaacagacgctgtggttgcagttcccatatcaataaggattaacggcaccggataaccggaaattcctgccactgcatcagcaacctgatctgcaccaagctgtcccggattatccatcataatattcagtcctgtctttacaccaggtccgagaacaattgcatttttcttaagaattttctctgcggcaagtttcacaatatttgtgatctgcggcactacagaagaaataatacagccctcaatctctgttttttttatatgatagatatcaagaacattctttaaatccaccgcatattccagttccgtctttgtacggttagtagaaaggcgttctataaaatatgttttccggtcatcaatacatccaactacaatgttggtgtttccaacgtcaattgctaaaatcataattatttatctccaatttcttaatcgtcctgttcccttaacagacagaatcctgcatcagcgaaaggattttatccaggatcctaaaagctgcgtcttctttactcataagcggaagagagatttcctcatcctgtgtgatcaatgtcagtacattggtatctccctgaaatccggcgccctctactttcacattgttggcagccaccatatccagatttttctttgccagcttggctctggaattgtcgatcacattctgtgtctccatggaaaatccgcagagaaactgtccatgccgtttgtgttccccaagaaacttcaggatatcatctgttctttccagttctatggacatctgtccgtcacttttcttaactttttcttcactgatcctggcagggcggtaatctgccacagcagcagctttaataatgatgtcctgttcgttgctgacagaagttacagcttcatacatgtctcttgcagtcacaacaggtatcagatttacaaacatgggcggttcaattgaagtacgtccgctgaccagcgtgacatctgcacctcggagcatggcagctttcgcaatagcataacccatttttcctgaagaatgatttgtaagataacgaacaggatcgacagattcctgtgtaggacctgcagttacaaggattttctttcctttcagatctttctcacaggcagcttcgcgctcaatataggcaagtaatgtctcaggttccggcatttttcccgctcctgtgtcaccacatgccagatatccacacgccggagcgatcacttcatatccgtaatgctccagaatctttaaattatcctgtactacaggattctcaaacatattggtattcatggccggggaaatgaattttttacatttgcatgccatgatcgtggtagtaagcatgtcatctgcgatcccatgtgccagtttaccgatcacattggcacttgccggtgcgatcatcaccgcatctgctttctttgcaatcgatacgtgttctacctgaaactgaaaattccggtcaaaggtatccaccagacatttatttcctgtgagagtttcaaaagtgatcggattgataaaattcgtggcattctctgtcatcagcacatgaacatctgcatggcgtttcttcagcgcgcttgccagatatgcaatcttatacgccgcaatgctgcctgtcactcccagtaatactgtttttccttccagtgtcattttcctttacctctttctccgaaccatattatttctggctgtttctacgtctttatacttatatgtcaaaatctatcataattcatctttgataacaggattctgacttttacaattctatttattatagactaattattatcaaaaatgcaataagtgatttgttttatttgcgaaacaatcagaacgttactgttcacagtaacgtagccaaaattcattccagattgcctgcggcaatggaattttggcttgtatgtctcgggattttggcatattcatgccaaaacacctcgcgggatagtggtgtgtgaacagtaacggtaacctcagcaagattacacttaaccgttgtttataaagatttcctgcattataataataatcagtcagatatccataatttacactggactctacctaacttaactgacagaccggatcactataatatactgatatcaacatataaatccggtgcatgactttgtggaggaatataggaatatatgaagaattatcagatcacgcaatggtgcgcagcttttatcagacagcaggtacaggaaggagacttctgtattgatgctacaatgggaaacggaaatgatacgcttctgctttcacagctatgcggagaatcaggaaaggttcttgcctttgatattcaggagcaggcactgactgcaacccaaaagagactgaacgccggacatgttccgaaaaattacagactgcttctggaatctcacgcaaatatggcagaatatgccacaccagacagtgtaagctgcattgtatttaattttggttatcttcccggtggagatcattcacttgcaaccagaggtgaaaccagcattcaggcattgacccaggctttaacccttctgaaaaaaggcggaatgatttctctttgcatctacagcggcggcgattccggatttgaagagcgggatcagatccttgactggctgaaaaaccttgattcccatcaatatctggtaatcaaaagcgaatattataatcgccccaacaacccaccgataccagtgctgataattaaaaattaattgtatctgttccaaaaagcagcagaaaagatttttcatatctctcctgctgcttcttgttatgccttttcttcaatttttgtttgttctccgggcacttatacttcgatttctgttttacttaatctgtaatggtaatcttctcaataaccggctgctgatctgacgggattgttccattgtcgtctgtcggttttgcatcctcgcagatcttatcaacaatatccataccttctgtcacatggccaaatcctgcataatctccgtccaggaatgtactgtctgcctgaacaataaagaactgcgagcttgcgctgtccggatcactggctcttgccatggaaatagtccctcttgtgtgggaaatatcattgtctactccattgttgctgaactcacccttaatattctcttttgatccacctgttccgtctccgttgggatcaccaccctggatcatgaatccatccataatacggtggaatgtcagtccgtcataaaaaccttcctgtgcgagtttcacgaaatttgtcactgtgatcggtgctgtatctgcatccagttccacatcaatcgtaccgtaatcctttacttcaatctctgcgtgatgaattcctgttaattctttggaagtatccagaagcacactggttgtactgctgtctgaagaatctttattttcagaatctgtatcagcagaatcactcttttcatcagaaccatcagaaaatccggctttttctgcctcttcttcacttgctacattatcactgtcagaagaagcagcttttgtctctgtctcttcctgagaagaagtctcttctttcgctgtttcctctgtttttgtactctcttctgttttatcactgctgccacatcctgccagtaaacctgctgacatagctgtaacacaaagtgctgccagtaattttcttttcattttcctttacctccgaaatcatttacaacaatctgattataacctatctcagaaaaaaaacaactcttttcacaaaatgttcagattgtgaatgtttcctgtgtttacttctttctgattgcctgttaaaatgtatatggctgttcagttctgtaccttccctttttgcagtgaaaccggaacaacagactgatgaacagtcagaatatatctgcaaaagaaagcgaggaatccaaaatggaaaaaataacaagttttaccattgaccatatcaaattacagcctggaatttatgtttcacgtaaggatccagttggcggcagtatgatcactaccttcgatatccgtatgacttctcctaacgaagaacctgtgatgaataccgctgagcttcacacgatcgagcatctggcagcaacattcctgagaaatcataaagagttcggctctaaaatgatctactggggaccgatgggatgccgtacaggcaattatcttcttttaaatggagattatgagtccaaggatatcgttccgcttatgatcgagacttttgaatttatacgtgattttgaaggtgaagttccgggagcatctgcaaaagactgcggaaattatctggatatgaatctgcctatggcaaaatatctggcaggaaaatttctggatgaagttctttatgatatcaagccggacagacttatttatccacagtaacattctacagtattacagcaatcctcataaataacacaccgaaaaagatttctatcgtatttttcagacaaaaaaagcagaagctgacaggtcattatcccctgctgcttctgcttttacttatacatttctatcaacatttttccaaaaaagcctttattgtacctctcatagaaatatatttaaagaggactgatacaaatttttatatcatcagattattctgcactttcatcataagacgtatctgctgcagtctcacctgcgtctgctgccggagctgttgttgtcacaaaatctccgcttgcataacaggtctgtccattataatccacacgaatccatccattctcgcatacacctgtactgttcagctgagttccggctgccacacttgaaatcagatctgcatctgaacttgcatcagaacgaagatttaattctgatgacgcataataggtatcggatttcacttctacttttacaccactggctgtctgctctgctgccggcgttggtgttgcttccggtgttggtgttgcctctgaagcctcaggagtaggtgtgacttccggtgttggtgttactttaacgatcataacgctggaatcaatagtaggatcaaatccgcatccctgagcagcaaatgcaagtcccagtacaagaaccagccaaagtgatttcttcataagtagtttcctcctttatcaaacacgctctgtcccctcgtgttttctgtgttcgctttatgtattaatatacacgattcttacagataattcaagtatgcgttttgtcctgctttgtctgctttcttccatttgcgcggaattgctgcagggttactgttcactccgttctcagtaacgctgtaggttctgtgtttatctacaacaattcataaaggacttccacctcgccgccacagatcattcccagattcgcaccgccctggttagacagattatattttctgatttcaccatgctgcgcttctggtgcatatttcaaagcctgaaattctacatttccgcctccgatgcttccatatgaattcccgtctttatcaataaacattttacttcctgtccctcttggagaagaaccactcttggatatgatcgtgatcataattccattttcttttttcctgacagcatcctccacagctccatcaatataagaaacatcatacctgttcttttcctgaacgatctccgcagcaatacttacagcaatctctgccggcatatgtcctccgatcggcaatccaatcggtgcatggatactgttgagctgttcttcgctgaaaccttctccgagtaatttttctctggtcagttttaccttatttttactgccgatcattcccagataagtataagggcgtctcaggatctgtctggcacaggcactgtctccgagatgacctcttgtcacgatcacataataagcattttcataggccggtattttgtctgaaagtttatcatagctgcctttgatcagccgatcggcatccggaaatctctctgaagtcacaaaatcttctctgtcatccataacagtcacatgaaatcccagcatttttccgatttttgcaacaggctgcgaaacatgtccgcctccaaaaatgataagctgcggatttttcacataaatttccacaaagaaatctacatctcccatatgaacaacttttgtctcctggcactccgccagatcagcttcatattttttccagaaatctgctgtattttcatcggatgataaacaatggttttcttttatcagacatttttcgcccttatgattcccgtttaaaaccattgctgtttttacttttcctgtttcttccaaaatttgataaatttttctgtacataactctctcctgtttcgatataaaataccttttgaccatgacatcattatatattataattgacagaaaaagggggattattatgaaaaaaaacttttttctacacagtctgcccttcagactgcttgtcggcgtggcttttggaatctgtatcggacttcttcttaatataatagatgaatctgccattacgactgcagtactgaatgtggttgtaacatcgaagtatattcttggtcagctgatcagcttttctgttccgctgatcatcattggatttatcgcaccatctattaccagactcggaaacaatgcttccagaatgttaggtgttgcagtcagtattgcttatgcttcctcactgggagctgctttattctctgcattatccggatacctgctgatcccacatttgtccttcagctccactgccagtcatctcaaagctttgccggatgtagtttttgaactttccattccacagataatgcctgtcatgagtgcacttgtactggccattatgctgggacttgcatctgcatggacaaaagccagtctgatttcttcttttcttgaagaatttcagaagatcatactggctattgtatcaagagtcattattccgattctcccatacttcatcggactgactttctgttcactggcatacgaaggaacaatcaccagacagcttcctgtattccttcaggtaatcgtcattgttctgattggacattttatctggatagctcttctatatatacttgcaggaatttattccagagaaaatcctctgaaagttgtgaaacattatggtcccgcctacctcacagccataggtaccatgtcatctgctgccacactgccagtcgccctccaatgcgcacacagagcaaaacctctccgaaaggatatggtagattttggtattccactgtttgccaatattcatctctgtggttctgtcctcacagaagtattcttctgtatggcaatctccaaaattctctatggtgcagttcctgcgccgggggccatggttcttttctgtgtcctgcttggaatttttgccattggtgctccgggtgtaccgggaggcaccgttatggcatctctcggtattatcaccggtatcctgaaattcggcgattctgctacagctctgatgctgactatctttgcccttcaggacagttttgggacagcctgtaacgtaacaggcgatggtgccctgactctgattcttaccggatatgccagataccacaatatcagagaacagaaattgcaataaaagtttaaaataccatcatatctgtcttttttctcagatatgatggccttcattttcttacggacgaatcaccttatctgcacctgtcatacgctctgcaatcgtatacatatcggtaacttttccaaccatcagtttctccatcagtccataatgcttcaggcaggtaccgcaggtcaggatttccacgccttcttcttccatctttttcagatcttccagactttcagagtcttctgttgtaagttttgcacctccattatagaaaaggattgtatccggatgtgtttccatctgagaaagggcatagataaatcctttaatcaaaatctttcccagttcatcatcaccatttcccataacatttgaggagattactgctaccgtcacttttttatgcggtgcttcgcagacaaattcctcttcttccaaggtaccacctgtctgttcagtctgtactgccatcttcacctgatactttttgtctcccagtttttcagatacaaacgtacaacctgttttatttgcaagtctgctcagattattcactgcggtttcattatcgatcagaatttcaatctcatcaccgactgccgcattatcaataaccttctttgtcatcactaccggaatcggacactgttttcccattacatttacttcatgtttcattttctgtcacctcttgttattctttatattcactgcttattactcttcgcaatctccctagagcgtgtctgaaaaatcattcccgcaatctgcacgccccactttgcaggatatttcacccgaattcagttgccgtagcccactacggcgccctcatccgggcaaaatatcccacaaattgtgacgcacatcttgcagaaagcctttttcagacacgctctaggggacttacctgattacaacaattccataaaatatatattttacatctgattcttaccgcgtttaatatattttcctgttttctccagaattacttttccatcctgcaccacatgagctcctcttaaatatacgctgtcaatatctccatgaagcttaaatccctcatatggattattatccgtatgatacagatgtgtctttgcagagataacgttttccttctcaggatcaaatacaacaatatctgcatcacttccctcacgtatcacgcccttattgggatacactccgtaaagtttagctgcattctcacttaacagacggcacatctgttcctgcgtgatcctgcctgtgcgtacaccgtatgtataaagcagagttcctctcgtctgtactcccggcagccctcccggaatcttcgtgaaatcatctttaccaagagctttctgctccattgtaaagctacactggtcagttgcaaccgtctggatctgatcattcgccagtgctttccacaggcagtcctgatctgctttcttacggattggaggtgcacacacgtatttggcaccttcaaaatccggttttgaatatacactgtcatccagaagcagatactgcggacaggtttccgcatataccttttgtccgttcattctggcacgcataacttcttcaaatgctttccggttggtaagatgtactaccattacaggagcatttgctgcatctgcgatcacaagaaggcggtgaactgcctctgcctccataatatccggacgcaccagcgggtgattctcaggtcccagacgtccctcttttttggcttctgcgatcaacgcatcgattgcccctgcattctcacaatgtacccctgcaaaacatccgtattcatttaatttcttaataatcttataaaggtcaccgtcatctacgatcattgccggataagtcatgtaaagcttaaaactggtaatcccttcattgatcatatcttgtatttctctctgagtttcctcattccattccacaatagacatatggaaagaataatcacaggaacatttcccatctgctttctcatgccacttctcaaggccttccctcagcgtatggccacctttatcctgagacgcataatcgatcaccagagttgtacctcctgcaatggcagctcttgttcctgtttcaaaatcatctgccgtcactgttcctgccacttccaggtcaaaatgtgtatgtccgtctataaatcccggaaaaagcagcttaccgtttacatcaactacctgtgcatcctctgcttccagattccggcctacttttacaatcttctctccatctataagaacatcttctctgacagacatatcccccgatactactgtaccattcttcagtaaagttttcactgtttctgacacccctttctttattataagttagggacaaaaagtattttacccctaacttatcgcaattctcatgtttaaaatataccacgattcctatatcacttcaatgatttatgattataatcacaaattttttaaggtattcacatttattttttttaggctctttttatttccttttttttatgatagaatataaaaaatgtgcagtttccatgtgtctgcactgaacgttttgacggataaatttatccgctttactacatgctcataatcgaatgactgttactgctcagactatagaagccccgcctgattcggttatgatccgtttaaaagttatattaataggaggaaatcaaatgggacgacttactgtgttaaaacaaatcgctgctgatcttgcttcccagttcggacctgactgtgaagtagtaatccatgatctgaaaacttcggagccggaacattccatcgtctacatcgtaaatggtcatgttacaaacagagatatcggagacggaccatccaatgctgtttttgatgcgatccgcaatcaggaaaaaggagcaacccccgaagaccataccggttatctgatgaaaacagcagacggcaagatcctgaagtgcagcacttcctacattcatgatgacgatggtacccttcattatgttttcggaatcaattatgacattaccaagcttactatgatcgaatctgcccttcattctcttgtcactccggaaaataaggaagagaagcccaaagagatcactcataatgtcaatgatcttcttgatcatctgatcgaagaatctgtagctctggtaggcaaacctgttcctttaatgaataaggaggataaggttactgctattcagttcttaaatgatgcaggtgctttccttattaccaaatccggagataaggttgcaaattatttcggaatctccaaatatacattgtacagttatattgatgtaaataagtaaaaacaggaaagaatgatataaaaacagacctgcatggtacttttccatcaggtctgtttttcttctgtttttcttttttcatctagcgccggtatatcgttaaatatgctctctctttcatctccttcctcgtaatttttttcgatattcctttatagactgattataacacagaacaacaacattttttctctttcacgcgaacagtaattatatggtgtgaatggtatggaaaaaggttgtctttaaatttgaaatcttttatacttgatatatatacaacattttgatgataaattttattaatccttatcagacggaggtgctgttatgtctgaacagattttatctgctgttcatggtgtcactaccatgctctttggaatttactgttctgcattttttcttgggatcaaaccgatcagaaaaaatatcctgactatgtttctgttatttttagggcagggactgttatatgtaattgatctggcattatttggggaaactcttgcaaatatgtcctatcctctgatcgtacattttccattggttttattcctctccgttcattataagtatcctctgatttcttccgctgtttctgtcttttctgcctatctgtgttgccagataagcaactggaccggattattcgctttggcaataacaggattacagtggtgttattattctgtgcggatcttaacaacaaccttaacttttgtccttctttatcgatatgtatttcgatctacaaaaacaatttttacaaaaaatgcacgtgagctttccatcatcggtttcctgccatttgtatattacgtttttgattatgcttccaccaagttttcaactttactttattccggaaataaagcagttgttgagttcatgggatttgcattctgcattgcctacctggtatttctcatcatctactttcaggaatatgagaataaacaggagataacgcaatacagcaatcttcgtgaaatgcagcttcaatccatgcaaaacgaaattgaacaggtaaagatcagcagccagagactggcgatcctgcggcatgatatgcgccaccatctgagtattattctgacccagctgcaaaacggacatccggataaagcacaggaatacatccatgaaattaattctgcatatgacgatacgatcatcgccgcctattccggaaatgaaatgctgaactctgtgctttccatttatcattcccgtttcacagacagaggattgtctcttatatgcaatgtttctacaggaaaagaacttccatgctccgatctgtccctctgtacaatcctgtccaatgcgctggaaaactccatgcatgcactggagcagctggaatcaccttcaaaatgggcccggcttactctttcacagaaaaagaatcacattctgttccaactggaaaatcccgtagaaaaaattccggcatttgtagatggagttccggtttctaccagaaacgggcatggaatcggtgtcaggagtattatttattatgtggaacaattgcatggacagtgtcatttttctatcgtggaccattgctttgtcctgcgaattatcatctgacacaggatttccactgccggatacaatacataacatttattcactcacagaaaggttttgataaaaattatgaatattgcaatttgtgatgatgaaatactctttacccgggaattaagttcacttctgactcactgggcggaaaaaaatgatttttcacttaccctgtatccatattccaacggtgatgatctgttaacagctctccggacaattccggtagatctgatctttctcgacatcatcatgccattattaaacggcatagatacagcaagagaaatacgcagcatgggactgactgttcctgtgatttttctgacttcttccagagaatttgccctggattcctatgatgtaaaagcttttcattatcttttaaaaccagtaaatactctgaaacttttttctgttatggatgatttttttaaaacttataatgttccggcggaaactttcgtcgcacatactgcagacggattctgctcaattacgctcaatgatgtagattatctggaagctcagaataaacaggttctggtctgcctttcaaatggaactactttaaaaatccgcgaattatttgtaaagtgtgaaggggtctttactccggcaaaaggattctttaaatgtcaccgaagctatattgtaaacctatcacacataaaacagtttacaaggactctagtcactaccggcatttcctctgtccctatttccagaaataactattctgcattcaaagatgcctatttttcatatatgtttgattctaactccggttaatccgataattacagcatttgcgggttactgtcccctccgttctcagcaatacatttcgcagttcactgcttttcgtacaccctcacatattcttatcgttccatttcatgtgcctgtttgtagatttcacaggcagcataattcacacatctgtcatgtgcacaatccataaatgtgagggttcttttatctccttccatcgtatattcacagcagacagtctgccctccattacatgttctgcaaaatcccgaaataaactcttcttctatctccattttatctctcctcaattttccttatgtctcattatcgttccgagaaacaaaaatacaggcaacaatatattcgttactgttcacaaatatttttatttattcgtccgttttttgttgcattttacaacaaacagatttataatcagtataacatagaaatgtgcggaaacactataacaaacataaaataatcgtaactgttcagtaccttcacagttacgagtcaaaatccattaaaaatcgccttcggcgatgggattttgacttgtatgtctcgggattttggcatgttcatgccaaaacacctcgcgggatagtagactgctgaatagttacaaataatcaaaaaagagggaaaatgtcatgaacaaagaactttatgatgaggcaatacgctccaatgtcctgtcacgcaaactgatcgaacagttgatggaaagtatgaattacagtagtatctcttttatcaactggactgtagaggtactaaagattattaaaacacgtctggaacgcggagataaaatcacagacgaagtatccggaattacttatgatataaaatctttccgaaattttgtaagcaccaatttttcttcctatattacaagtcaggtctttgatgctcctgataaggcagagaaagtatatttttctctggaagccaccgacgacggacatgcctacaatatggttatggcaagttcatctaagaacaaaacatataagtggatttccagtctcagcgaacgcttttcattagtggagatgatcgctaccggaattgtatatcttaaagataacaggacagatacatatcagccatttatttccggaaatggtaagtactgcagatatgacgtaaaaaaaggacagattgtcgaattataaaatgctgagattgatttgcatcttgttatattatgcataatcttaagaattgcataatacagaacaaacaacaatcattgagtcagtacatacaagaaagaatcctgcttgcaggattctccgcctgcggcgggtcgcttcagcgacataattcctttccgtcgcagtgcgatcctgcccggagggcttttttatgttataggaacattacggagtaatttcctataacataaaaaatcccctgccattcagcaggggattttaatttaatcatattcagattagttgttgataagtttgtcttcgccattccagctgtaaagtttacggatttcttcgccaactttctcagactgatgctcagaagctttctttctcatagctttgaagtgaacctgtgcacctgcatcagacatatcaagtaagaagtcttttgcaaatgtaccatcctggatatcagaaagaattttcttcatagctttctttgtatcttctgtgatgatcttaggtcctgtgatgtaatcaccatattcagcagtgttggagatagaatatctcattcctgcgaatcctgactgataaatcaggtctacgatcagcttcatttcatgaatacattcaaagtatgcatttcttgggtcataaccagcttcaacaagtgtttcgaaaccagcctgcataagtgcgcaaacaccaccgcaaagtacagcctgctcaccaaagaggtctgtctctgtctctacacggaatgtagtttcaagaagaccagctcttgctccgccgattccaagaccatatgccagtgcaagatcctgcgcttttcctgtgtaatcctgctctacagcgataagacaaggtgttccttttccagcctgatactcacttcttactgtatgaccaggtgctttaggagcgatcattgtaacgtcaacattctttggtggtttgatgcatccgaaatggatattgaaaccatgagcaaacattaacatgttgccttcttcaaggtttggctcgatggattctttgtaaagtttagcctgtaattcatcattgataagaatcatgatgatatctgcctgtttagctgcttcagctgctgtatataccttaaagccctgctcttcagctctcttccaggatttgctgccttcgtaaagaccgataatgacatcacatccggaatcctttaagttcagagcatgtgcatgtccctggcttccgtatccaataattgcaatttttttaccatccagtaagcttaaattacaatcttcctgataaaaaatcttgttagccattttattttcctcctgctaatcgtaaaaaaatttatcgttaagggatgctcccctagcaaactataatatgtactgtttctgagatatttttcaatttcctgcgttccgaaaagtcttccggtctttcatcagaaataggttacatcctgcgaacctcttgataaaccggtcattcctgtacgtgcaagttcgagaatctcgtaatcacccatcagctcaagaaatgcctccagtttattatggttacctgtcatctccagtatcatggaatccacacttacgtctgcgactttcgcatggaaaacatccgctatggaaatgagtccctgtctctgctccggtttcgcagccaccttgatcatcattaattcatggcatacgctgttgtccggctccaggatcttaatatctcttacatctacaagcttggcaagctgattcgtgatctgctccagaatcagttcatccccgctgcacacaacggtaattctggaaaaacgctcgtccgctgttacacctccggtaatgctgtcgatgttatagcctctgcggctgaataatccagatactctggttgttacacctgcagtattatctactagcagggataatactctcttctgcatgtcccacctgctttcaacgtgtacattttcaccacgttaatataataaatagctcgtatggttaccattatatcaataatcatgattttgtcaataaatttttcgcacaaaaacaaatgtctttctgtaacgttactgttcacttcgttcccagcaacacgcttcgcgggatattaccagtgaacagtaactctatgataacttttgtaaaaacatcaaattaactgcctatatcagatatttatttctgaactcttcgatcattttcggtttcagataaaatacggtctggaaaaacttttccatagaaccataagtctttttcactgtttcaaaaacagcagccagatactcctcttttacattatatataatcggaagcttctcggtcattttctcatctgcctccggccaggtctgtacaagtctctgcatatataccagtttgggctccatataacggtttgtgcgcagatagtcttcatatatcacatcttcctccacccccagcagactgagcagaaaagcagtcccgatccctgtacggtcctttccagttccgcaatgccacaaaacagcacctttttcctgcctgaaaagaatatcgataaacctcgcatactgtttcaacaccagctgatccatgcataaattcctgtactgtctgatcatatattcttccatatcatctgggagtcctgcaagcattttcacaaactgttctctgttgctgataacctgcacatcctcatccacaaccggtacatggtagtattctacttctgctataatagtatccggtttacattttctctcttctgccgaacgcaggtcgatcaccgtcttcagattgtattcttctctgagtctgttcttatcgctctctgaaatgtgataaagttccccgcttctcagaagcctcctcggcaggatgtgtctatcatcagctgtaacgatcgcacccagatctctggtattcggcagactatgaagagatatcctgccgcccttcgggaaacctgttgccatatccgggtttaatatcttaagaatgcggatacactcatgaatctctttttctgtcatatcgaacttgtatctcttcttacgtctggtaacaattacaagataatttacactcagctgtctgtcatcaccttcatctgctccctcttttcgcatatatgcccatacaatgtctttacatggaagattgtttatcatcatatgtctggtaaaaaccagaaatccatcttctatccttatctttccatacttcatgatccaccactccactgtctgcaattttattactgttcactctgctattagagcgtgtctgaaaaatcattcccgcaatctgcaaggcatactgaacagcaactatttttttcagaataacacagaaatcggaatttgacaattcctgtcaaacgtttataatcatggtgttattgtgatatagcagtcaccttatgaaccgtactttttgtacagaaatcatttttttgaaaggatttatgaaaatggagaatcttattttctgtcttaatgctacaatcccgatttttctcaccctgatgctcgggctcttttttcggaagatcggactctttgatgacacctttgttagccgtctgaataagttcgtatttaatgcagctctgcctgcgcttttgtttctggatattgcaaagtcagatttctacagtgtgtggaatacgaaatttgtattgttctgcttctttgtcacactgatcagtatcggaatttccacaggactttcctatctgctgaaaccgcgaaatatccagggcgaatttatccaggcttcttaccggagcagtgctgcgatccttggaattgcaattatccagaatctttacggaaacgcaggaatggcaccgcttatgatcatcggaagtgtgccgctttataatgtgatggcagttataacactgtcactgttcgctcccggcggcggtaaacttgataccgcaaagcttatccgaaccctgaaaggaatcgccacgaaccctattatccttggtatcctgacaggtatggtatggtcgctgcttcatctgccaatgccaacaattctgaatactgccgtagataatctcggaaaaacagcgactcctcttgggctgatggccatgggtggcgcactgaaattcggcaaggcattcgcaaggccgaaaccactgatcgcatgtagctttctgaagcttgtgggatatgaagctgtatttcttccactggctgtgcttctgggattttcccatgatatgctggttgcgatcattatcatgcttggctctgccactactgtaagctgttatatcatggccaaaaacatggattatgacggcgattttacttccggtgtggttatgactaccactctgttaagctcctttaccatgacaatctggctctatatatgcaaaagcctgggactgatctgagcccaggctttttatgtttatatcagcttcagatattccagtccgtttctgattccataatggaacatatcctgtgtaatatgatcagccagagcttttattttctccgaaccatttcccatggcaaccttcaccgccgcatattcaaacatggcgagatcattattgctgtctccaaacacgatcgtatcctcccatggaatatcaaagagtctgcacactgccgagatccccactgccttgttaaagccctttgggacaagttcaatggtggttcccgcaatccctgaaccactctcatgacggataatgtcataatactcactcagttccctacaggcagcttctgcatcacagccttttatcattttggcactgatcttattaatgcgcatacaatcttcatttcccctgatgggacgccatttagatcctaaagattctgtgatcagatccgtataccagttcacatctgtattatattcatccttatcataatacatgaaatctgcaccttccataaccgggaccagaccatatctgcgcaggatttccactgatttttttgcaacttccgggggcatctctttattaaaaagacgttctccatctttttcaatggtagccccgcaggcactgatcataccggtaaatggaagctcttccagataccaggaaacaaaggccctgctcctgcctgtgcaaagccatgcgtcatgaccgttttctcttaatttcttcaatgcctcctttgtgctctggggtacacccttttccatatcgcagagtgttccgtctgcatcaaaaaacactgcttttctgttcactttcttatctcctgattttcatatatactttttatcttccagtgtgccgacaagctatgcaaaaaatactgtcgctgccttaaccaggctctctgtatctttcgcacctgtggtttcatatacagagtgcatagcaagctgtgccagaccgatatccactgttttcacaggaacctgggtattggaaatatttcccagcgtggatccgcctgccatatccgaacggttcacaaaggtttggtacggcacctttgccctgtcacagatatccttgaaaattgcagcggacactccgtctgtacaatatttctggtttgcattgtacttgatcacgattcccccgttcagcaccggacggtttaccggatctgtcttatccgtatagtttggatggagagcatgggcattatctgcagaaatcataaaactgtctgcaagtgccatataatattcctcctgggtacgtcccagtcccatattgatccgcatcagagtatccttaaggaatgtggaggcagccccctgtcttgtactgcttcccacttcttcattatccagcacacaatgtacagaaatgctttcttcacgatttccctgcaggaatccctccatagaagagaatgcacactgcagatcatccagtctaggtgcagagacaaattcctcatttactccccacagagtacccggagttctgtcataaagaaacagatcatgtcccagaatatcttctttctttacttctgcagcctcagccacagtttccataaatctgccctttccttccttatcgctgaaaagaggcagcatatccttctgcacattatatttatatccgtcatttacttccctgttcatatgaatggcaagattgggaatgaccagcagatctctgtccacagccaccatcttctctctgatttttccatcctggcggacgatcagccttcctgccactgacagaggtctgtcaaaccatggagacagaatcattccaccgtaacgctccacatttagtttgatataagcattctccacctctatctcaggattctccttgatcttaagagaaggggaatcactgtggcttgccataatatgaaacttccacacaggcttctgcggaatggaaaaagctatgattgcagaatgatttctggtcacataataatttccgccttttttaagcttccagtgatcctcctctttcaattcttcaaagccttctttgtcaagccttttggtcatctccgtcactgcctgaaatgcagtggggcttttctctatgaatttcagtaacttctttgctgtttttctgtacatagtttgattctccatttgaatgattaatcaagcggatattcgcaatccgcttcgctacttgctcataatcgaataactgcttcgcagtttatcagaaggagcttgcactcctcctgatacaagcaagtccccacccactgcttattacttttcgcaattgaagcaggggacttacttgattcggctaaaatgctacctgatttatactgttttttattataatcagtctgtcctggtaataaaaacagcagtcattatttccataagaaatatgtgctgctgtttttatatcagtctttaatgatcagagccataaaaatcagatctgtatttcctgtatttgcaagtgcatgtccatgattgtccggtgtgaatgtaatatctcctgcttttaccggacgataggtaccgttatcattgtattcgccctgtccctgtaaaatatagtaggtttcactttctccatgatgttcatgatatcccagtgaacatcccggctccagggttacctgtgcatacagtccacatttaccattcaactgttctgcatcaaggatttctttgatgattacgtgaccatttccacctgccatgtgttcttcgcgtctgattttcataattttttgccctcctgtaggtgttttctcttttatagaatttccattgaatatatcatagcactgtttgtaaaaaatggcaaagtaaatatcaatggaacattcagaaaaatatcgttactggttactgttcactttattttgcagtattttcagatttgttcaaaaggctgtccagaagctgcgaaatggtctgatttaacacaggatgtcgcagatacggagcaatctgattcattggtacaagaacgaaatcgcggttgtgcagatcaatatgaggaatatgaagatctggcatatcaataatttcctgatcataaaacaggatatccagatccagtgtccttggtccccagtgaatgatacgttccctgtttgcctcctgttctaactgatgcagtcgcacaagcaattctccaggagtaagaagtgtccgcattttcagaactccatttaaaaattcatcctgatcagtaactccgtaaggttctgtaataagataatcggaaattgcctctatacggcatccttttgtctctgccagaccacggattccattgtctatatacatctttttatcacccatattagagccaaaagcaatgtaagcagtatgccatttccgtgtaatttccacagatacggttttcagaggaagaccaaccggtgcccagggcttttcgatcttcagagtgattttttcaagtccggaaagagagcaaagaagcatttctgcaagattctctgcaagagattccagaagtttataagtatgttttctggtgaaatcagtgatcatatggctgacttcgccatagtttatggaagcagacaactcatcggttaatcccgccagacgtgttctggtaaaaagtgtagcagaaataacaaacttctgtcccagaacattttcttcgggatatacaccatggtttgcaaaaacttccaactctttaatttctattttatctaatctggtctcatccataacagtaaatcctttctgtatgttatttatatttaccatctgttttgtgccagtaatttatctgcgtcccaggattgcttctgtcatctggatcacacgcttgttttctttaacatcgtggacacggacaaaagagcatcccttcattacgccaattacactggtagccaaagtcccctccacgcgctgatctacaggaagatccagtgccagtccgatcatggatttgcgggatgtaccaaggagaaccggaaatcccagattctgaaaaagctccaggtgattcattgcttccagattcatttcaaatgtttttccaaaaccaattcccggatcaagcatgattttttcatctttaatgccggcctgtcttgcaagattgacacattcctgtgtttcggcgagcatatcaatgagaaagttttgatattctgtattagatttgttgtgcatcagacaacaggccacatcatattttgcgatcacagctgccattttcggatcatattttaatccccagatatcgttaaccaggtcagctcctgcctggatagagctttcagcaacactgctcttaaaagtatctacagaaacaggaatgtcaaaatgttttttgaccgcttcaataacaggaagaactctctgcgcttcctcatcagcactgacaggtgtatgaccgggacgtgtagattcgcctccgatatcaataatatctgcaccatcagcaatcattgcctctgtatgtttcaaagcttcatccatatgattccatttgccgccgtcagaaaaggaatcaggggtaacatttagaattcccattatgtaagtatgattcttagtatcaaaaaaacggtttccaattttcatgagcagagcccatcctttcttttatgcttatgagaaagatcagtattcaattttcatattttttttatcatcagaccaatagcattcagaagcagcggaacataaaaaacaatttctggactgcttatccgctttataaagaagtgctgacaacgtactgcaagaatctccttttcggtgatgtccaatggaaaacagaatcagttctttttcctgttctgtaaagtgcagatctgtcagaatttcccgtgcgatttctactcctgcaatatcatggggaatgttgtactgatattgctgtgcacgtccgatatcatgaagaagtgctgctgcatagataagctctttgggcaactccagatgtttctccagtgcataaatgtacatcaaccgtgcaacatccagaaaatgttcaggcgtatgacggcagaagatccgttcactttcaagttcctgtatttttttataatgttcctgataaaccgggtgcctccagatccgattgacacgatccatatctaaaaaattgttattcatccttttaccatagaaaggaacattttctgcagttccttatcttctgtaaacgcaccacgggttacagtagtgattgttttgcttcctggtttttttattccgcgcatggtcatacaggtatgttctgcttccagcattaccataattccttttggatccagagtacgctccaaagcatctgcaatctgaacagtaagccgttcctggatctgtggtcttctggaataaacctctactgtacgtgccagtttgcttaaaccggtaactttgccgttggggatgtatgcaagatgagcttttccataaaaaggcatcagatgatgctcacacatggagtaaaaggtgatgtctttttccagcacgatttcattattttctacaggaaactgctttaacagatgctgatccgcttcatgaccaagacctccgtaaatttcttcacacatgcgggcaatcctgtcaggagtatcaatcagaccttcccgtgtgatatcttcaccgataccttccagaagcagacggactgcctgctcaattttcgctttgtcaaccattaaaaaataacctcctttgtatttttgaaatggagattatccttttgaccaaagtcaagcggatattcgcaatccgctttgctacttgctcataaccgaataactgctccgcagtttatcagaaggagcttgcactcctcctgatacaagcaagtccccacccactgcttattgcttttcgcaattgaagcaggggacttacttgattcggttaaaaaggatatctccaattgtgatagaatgtatgtcgaaaacattccctaacacaatatgagatatcctcttatattgtttgcaacgggtgcggataatataccgtaagacgcacttttcgtttcagtgacaactccccattcaccgaacacttgacgcataaaatcctattttgcatatcattcatttcggtattcagtataccatgtaatacgataatagaaaaggttttttctgacttttcagaataattttttcctactgccagaactaatagtttcgaagcacactttgcagatattctttatactgctgctttacatcttccggtccaacaattctcattccggatccaacaccggtaagccatccaaaaaactgcgagcttctgagtatctgtttttacatttaccactcttcacatttaatatcgcttatctgttcaattggaatgaccgtttgatctgtcatgatcatggtatgctcatattcgtctaccttttttacaataccagagtacgtaacataggatccgccggctttttttgcatcgggaacaaaataagttatcgatacattctgttctataccgatattatttctgattatgttgattttttcgttcaactgagcaatcacttcctcgctcagttccaatctttcatcggttaatctttctgtttcttttatcgcagcatcatgcccagtcaaggctgcaaaaggagcaaactgcactgcccgatcccgaagaggcatttgcggatgattcttagagaccggatgcggtaaattgatgatatcgtcataagaattatttttcatcctctttcaactcctttacgccttatgaccgccaatctgttcatttctgtctctggcggttgcaccttcctgaagattcatccccttcagcacagcattttttccaaatttctttttaatattgagcattgcttcctgcatacgtttttcgcgatccagcgcagcctcttcctcttcctgctttttcctttgtgcctcataatccgtaaaaagatccagttgctcatacaattcttctctctctacagagctttcatccacaagcctgttcgctgtgatattgattcttctgataagcatgtttctatcaacaatcctgtcatatagctttattactgcatccattatcatttttgttgaggaagtctgccgtttcagattggtcgttccatgtgcatgtttcggaattcttcttccataacggtcgatcgtaacctctccatgatactgctttttcctgtcggcattgttcagattctcaatatcataaccaactgtcagcacgatctggtctgtgacaagcttcttatccaccaaatccaaaaccatctggtccgtcatctctttgacgactaattttgctttttcaaagtcataaggacaatgaagtacctgcccggaacaaacactgttcgtttccggtttgtaagccttgaccatttccatggtacagggttcatatccccaggcatggtcgatcagcagctctgcattaacgccaaacagcttatataacagatcttcattatataactcatttgctttaccgatggaacatctggcaatatcgcccattgtataaagcccgtattcttccaacttctttgcatatccctttccgactctccagaaatcagtaagaggtctgtgactccagagtttccttcggtatgacatttcatccagttctgcaattcgtacaccatctttatctgctttaatatgcttcgccacgatatccatcgcaatcttacacagatacatatttgttccgattccagcagttgccgttatacctgtcgttttcagcacatcctgtatcatggtcatcgccagttctcttggtgtcatattataagtatgcagataatccgttacatccataaatacttcgtcaatcgaatacggaaaaatatcttccggtgcaatatatttcagataaatgctgtaaattctggtgctgtattccagatagagagccatccggggaggagcaacaatataatcaatctccagtgcagaattgatatttaattctgtactgtcatcagaagaaccaataaatgttctgttcggtgctttccacctgcgggcgctgttggcttcttttactttttgaacaacctcaaataaacgagcccttccgggtatcccataacactttaatgctggagataccgcaagacagatcgttttttctgttctgcttttatccgcaaccacaagattggtcgccaaaggatctctatttcgctctttacattccacagacgcatagaatgacttaagatcgattgcaatgtaagttcttttcttttccgtcattctacgcctccttctcctgtgtttcgtttgtgattatttcttcttatccatcgccatatgtatcattttctcgaaggattctctgaaatgctcatcatcctccgatgttcgttttcttggtccttttaaatgattctttccggatgcccttcgtgccttcttattcagatgccgctccataagcatctggtcaatattttcattcgtataccatttcccggactgatgaatcgcataagcaccttttcctaataccattgccgccactccataatcctgtgatacaataatatcgcctttatgacaaatactgatcagtttataatccactgcatctgcaccggctccaactacgatcacttcactgtaatcagatgataacacatgattggtatcacacaacaacgttaccggaagattatgctcttttgcaactctttcaacgatactgactaccggacaggcatctgcatcaaccaaaatctgcatattccctcctttaattgcacctgaacggagtgcgaacctcaataagattaccactgggatcatacagtcttacaagcttctgcccacctgcaagttctgtcagttcggtggcatatcggacgaaatacttaccagattcatatttcgcaagcaatccatctatatcaaaatcctcgaaatacaattccatcatgttattgaacggcgtagaagtttcattcaatgttttcccccatatgtcggcatcctgcaaaacaagtccctccgataagatcacattaccttcattcttaagaatcacttgcagtccaaataagtccctataaaattctatggatttttctatatcatccaccacaatcagtacattctttaacataccggccacctcgcaatccgcattcgattatatgatcttcccagacaaatgatcaatttcatgttgacagatctgtgccgtccatccagacagcttctgccgctgttttttccagttgaagtcataatattctacttcaatttcctgatatctggtcgtcttacgaacaccatccagagacagacagccttcttccgtctcatacatgtcatgctttgaaacaatcaccgggttaaacataacaacatctataaatcccatattcacaatgataatattcttccttacaccaatcatatttgcagccataccaacgcaccgttcccggttcgcctgcagtgtgtcctgcagatccttcccaatctggatatctgcttttgtggctagcttggatggctggcctaaaaagaaaatgtctcttacgatttgctttaccatttattttctcctgtatttaatttctaattcttatttatcctgaccggaaatctttctcatcggctcaagattaattttacagcatcaatcagatcctcactgaatactttaataccaactcaagtataacatagatataacccctgtagtgcataaactcaaaatattcctgttcactggcaaataaaatgtatttgccttctacgtatcccatatatccgttgcttgtgttataacctttcatctgccagttcccccttgatttctttttctaatattatcagtttacaccaaatggctgtgcaaaaatcccgacaaccaaaaggctaaacttcctggattatttttgcatttaacagctgaagatagagaatagcaaggacaggaagtagttagttacccaccttccggacattcgtctcaaaacaggaatcctactggaatacttgcaggtagataaggaaagcagcttatcttcctttgtcacagtaagtcctgtgtcataaagctgataagctgccattttgttctgcaggtattctatttattctcgctcaaccttttctttaactcaaagatattctcctcaatccgctgtattacagccttaaaatcatcatctgatttccccgttggatcatcaagtccccagttatcatcaaatgctcttccaataaaaggacatcccacattacagcccattgatactgcgatatcaacatctgggatatcagcaatcagcttactatactgaccatttgcttccatgtctattccataaatctctttcatgacacgaacggcatcctgattaatctgaggctttgtctctgttcctgccgaatagctttcaaatatatctgatgccagatgttttcccaatgcctctgctatctgactacggcatgaattatgaacacagataaatgcgacttttttcttattcatgaaatgggcacctctccttaatacattgattgttcttatcagaataaatacactttataacaggcttttccatttgtatattgaaattctctgccacatagtcaatcgctgagattatggccatataagaatctcttttacaccatcttggtccaccaatgctccccagaatccacatacaccgcctggaacagcttttcctctattcaatgattgtggaattaacctgatattcagctttctgcattgcagaaacagctttcccaaaacaacgataatcaataacatttaacggcactcccatcaattcggaagtgccactttttccaacttattattcacatcaaagcaaacctcgtccccttcattgatgttacattcatagagcatagcatcctctgcttttatccttatttcttcgcctgaagaattcgtaagcgtcactattgccatgactggcatgcctttcggtcgctcttcacaaccgaagtccaggtcttcatcaattcgttttactgtgtatatcataactattcctctgaaaataatattaaaaattagttctccatgttccttcgaattttctctatcaaagttacatctgctggtaaccaggcaacgctgtccagttgatccttcgtaagccattttgcagcttccgcttctttcagttccaggtgaccggctgtgacctctgcccagaagcaatccatagaaaggtgaaaggtgggatagtcatactctatagtgtcaatcaaatcccctaccttaatttctgtatccagttcttccatgatttctcgctttaatgcttcctgaggagtttctcctgcttcgatttttcctccaggaaactcccagccgcctttcagctcaccgtaaccacgagctgttgcaaaaattttattcttttcttccatattgtcacagataactgctgcaactacttttatcgtcttcatctttttcgtacctcaaatcatttatactgtaatatttgactgtaaataccgtaataaatcttctctcactggatgctgcattttcatcgttactttcgtgatcggctgcatacgtccgcgattatcttctttccgggcatttctggcttccaccacagtgaattgtcccatgtaataaaagcttgtttccgcatctgactttttcacaagcaagtgctttctttcagcttcaagtacatctttcatatatgaactatccaagcctttcccaatctgagagtcccacttaaaaatcagatcatcctcaaaagcatccgcataatcaggttttccatctacatagtttttttcatcctgactttcttctttgtgatatgtaataaaaatgaaaacatcatcttcaattcttttcataccatacataatagaggacaaatccttgccacagttcataagaaggcttacatctcttctggaatatttttcgtataatgcaaacggactatccacaattcgccccggaaaatacttatccttatatctggcaataccgacttttataatatcttccacctgtgtgtagaactgaatatgtgcaagtctttctgtataacttttcagtcttcggatcattcctgattggtcattttccagaatatcaatctgacgaaatttctgatattctgcttctttactcacgaaatgtccttgcagcacctgaattgcttcatttacctgtgatgtgctgattttaattccataggtcttttggtattcttttataaaatctgcaacccttatatgatctctgtaaagcaattgacttaatattgcaagctcatcagggcgcactcctgtgagaatcgttttggacaaatactccagtgttaatttctcctgttcgtttaggctattcttgtatttatccttttccattgcctgcataaaggcataatatgttttatattctctaataattaccagtggatcaatttcctgattttcatagaaatcatacagaagcgggacccgccctaaccgattcttcagagaaacatagctttctttgatcagagttttcatccctttgattttatcaatggacctaaatatcttatctttggaaatctcatcaaaatgaaccgttgaagcccctggtattgtactatttccactgattacatatttgcggattacatcagcgttataagaacggtctcctgataaagctaccggaatcataaagttattattataatttccaataaaatccaaaataacaacatattctttccctggtgcctttctaagtcctcgtcccaactgctgaataaatacaatgggagactgcgtcggtctgagcataatgacttgattcacttcaacaatatccacaccttcatttaatatatctcgcgaaaaaatataatccaagggctgcatctcttccgttgcatctgcttcatccattgccagtctctcgaatgcttcctgtcgtttttcttcattatcagcaccactaagagcaattgtacgatatcccagagcattaaactttcttgataattcttcgcactccttaacacgactgcaaaaaataagtccccttacacgatcgccactgtagccataatattccgactgttcgatcacatgcctcactctctcatcactggtaagctgattgaattcctcatctgtcaacttcgcagcctgcaatgttttatcatccagggaaacaacctcactgatgccaaaataatgaaatggacaaagaagattatcttccattgcctgctgtaaacggatttcatgagcgatttgataatggaaaatctcatatatatttttgccttcctgattatcatctcttttatccggtgtcgcagtcatacccaaaaacagtttcggattgaaataattaatgaccttggtgtaaatattgttagaactgtggtgagcctcatccaaaataatgcaatcaaaggcatttggctgatactgaaacaaatgtgtatctctgttcaaagtctctactgttgcaaaaacataatccttatcatattcatagaagcctgctcccaacaatcccattgtcactttcttatcaaaaactttttcaaaagattttttagcctgcttcgcaagtgttacacggtgaaccagaaacaatactcttttgaaaccaagctcacgcatagcaaatgctgatgcatatgtctttcctgttccagtcgcggagatcagcaacgcccgctcttctccctgctccagaatcttccgcaagttcgcaataaatctctcctgcatagagtttggctttaatctatatttttccagtgacgggatttcttcgcttttcgcgatttcccgctgatgttttatgatattgtagcgttctttgtagacttcataaaaatcatcatatggtaaagcgtactcactattccataacctctggaactcttctacgatttcttccgcaacctcaccattttccgtagaaatcagttttgtattccactctttatttaccgtcagcgccgcacttgtcatattggaacttccgatgatgatccgataaatctcttcttttttgaaaatatatcccttcgtgtggaaaccatttccggccgcttccacgtcatacattttcaaagtaacatttttcaagctattaagtttttcaagcgctctcggttcactaaagttcagataatttgttgtaagaatctgtcctttaacgccctttttctcaagctcttttaacgtctgcagaagcggtgtcacaccacccattgtgataaatgcaacactaatctgaaactcttcgcagcgcagtaattcatcctctacggatgaaataaccttcttcccctcttccggattgttcgatacaaacgctggcttatatgccagattcgccgccacggaaccatttatatatgcggcacttaggccgttttgcaattcattgatcacattcacatccattgaaatagaactccctctcatttcatgatgagcaaaacaaaatgctctgcttagtattataccttatgagagaaggtttgtcattgaaatctcctggaagcgagcgttgcaaatggaacaaaaaaacaggttcggacgcactgaaattaatcagtgtatctgaaccaggcttttctatggtctttccgatgaataactgggctggcttttcattgaagttactcatttaattgtaaaatgatttccaaaatgtgttcgtttctttttttatattcaccatatcatataaatatacttttccatctgcattatatcttacaatcatcgctacattaaattttgtattctatcctatcacactggcaccaaatggcatgaaagaaagtcttgccatcttgaaaaactgctttccaaacggaattccaactatcgtaatacaccatatacaaccaactatcagatttccaagtgccatttcccagccaaaaaatacaatccatatgagatttaccaagaatgaaaacataccagttccatacacgatttcttttccaaacggccagaatgccaaagttgcaaatttaaagcattgcaggcctaccggaattccaataattgtaatacaccatatgcatcctgcaaaaacccatgccagtccacccagcaatcctccaaatataaaccaaaggatattacctatagttctcatgacaacacctctccttatccaatgtctaatattcttttgcaattttctctgttatctcatatatttctttgaatttttctaagtcctccggcgatctaatcagcatgatttcttctatttttccagtccgtatatctttgaatcctgctacttcttctccggtacaaatgcttgcacgaataacaggtttcatatgttctcggtcatatgtttttttcacgattttctttttgaataatcccattctacctccccatctccgaatatctttgacaacaaaatcaactatttaattcctggaacatttttctgcatcaatcgcaagtacaaacatcagagcatccaacgcatttcctgtatccggcacatcaataacatatgtatcagtcatatgaaacaattctttactaacccgtgcaattgaataaccgcttcgatcaagaatgctataatcccattccataattgttccatcaatatgccatccattataatcaatattataatgtggtgtcaggaatgagaattctttgcttaagcatccgatataactgccgtttttataaatttcaaatttaggaaggaaggtaagaactttctgaacaaccattcctacttcatttccataagcatcataaattgcaagtttatgtccccaggacaactggccctttactacataaacagtgttgcctgcttcatcatagatatcatagctgtcaaaccatgaaaacagcctttgtttaaataatagcttcataacttttcaccgctctctccaacaaacataataggttctttataagtaccataataccatgccagaacgcctaaaaaaacatgtaaatcgaagaattaacccatcttatttcacagattatgataaaacatatctttccaacgccacctttctggtttactacaaatataacgctacgcttgaaatggatcttttttatagaaaataatttgtgaattaaaaactttatcctcacacgactgaagtcgcgtgcttccagacgctttaggcgtcagactaaatatcggcggatacgcctgtaacttaggccagcgcagttatgcgcatttttccatgccagatatggcaggttcccacattgcaggtagtccgctgtatatctgcctgcatttatgctgcctttaagatttccatttgtaaatgaagttctttcagatctgcataaacacatgaggttctacgctttaccgaagggacttttgcctccagcaaagacctttccgttaccggaaggggttttaaaagttctctgataaaatatcttgctccgatattatacgatgccgacaggtcacagttatatctttttcctgtctggaatacacaaagactgtgatttttcgggtcacgggacacacttccggagccatcgtatgcaagcctgctcgtattccatgcgcagactctggatacccgcattccttttctgtgtgcctgatgctcacagcgtttctggatatcccgttttctccacagatgcagtttctgttttttctttccggatatctttccctgcatttccagatactcgaatacgatcacatctgcatggttctcttctgcattttttacgatcgcacctgcaatttttcttcccagctctatgttcaggcgtttcgtatatgcccatcttccccgtgactgcgcagagctgtgttccctctggaatcttcggatccggcccagtgtgcggtacatccggtctttttcactgggatgattgataaattttctccccaggacagttccgtctgcccgcataatggtacagaccgcatcggtattgattcccaagtccacactacagatgatctgttcttttaccggtgttttcgtaagtgtcacttcttccgtataagaaaaacgcaggaaatatttatggtgtcttttctccagtgtcggggctgatgcctttttccccgaccagttcttgcgcagatattccatatctgtgtgatttaaatgcacacaaaaccatttccaatcatggccatcatacagtttcaggtatgcttcatcttttccttcttttccctctctgtacatgacatcacgataaaaaacaggcatggcatgattctcatacgccagtctgggtttccctgctttttctcttgacttttcccacagatccatccgtgtttcgtaagaagatacacttcccaatgcatgctggattgcggctcgcctcaggtaggacggcatcttcggaaagcgaagatcaaaatcaaagcgtgcaggattcttttttgtagtatgcaccagatgctctgcagcattaaaccgccttttggcatccggtatctctgccagttcttcccacacctgctcatatatttctgtcaggtaactgaccacagaccggtagatttccagtgtctggcggactgggatattctgttttcgtaattctacgccatagctggatacggtctgcatctcttttcctccaacaaatcatttcttctgtcaggcttttttcttttctttttccttttgtccttcgatgtaggcaagcacctggtctctgctcctgtcactgaccgttatggcacagtaagacggattccacagatgcccaccccacagttccttttttaactccggatgcgcaagaaacatctggcgtgcaagatttcctttcatgatcttgatcatatctgaaatataaaactgaggtttacagtccacaagcagatggatatgatccggcatcacctccattgccaggatctgaaatttatattcttctgcaagattctgtaacatttctttgcattctgtatcgattccgttttttaaaaccttttttctgtattttgtacaccagacaagatgatactgcaaggaatagacatatcccctaccatatgaaagtttgtttttatctatattaaatatatcttttcccatataaatattataccatatgtattggtttatgtaaacatttgttctgttgttttgtaaaaaaatttgcgcgtctaactcatcactggaagtaacgagaatgcgacgcgcagttattcaatttgagttattctgaataccccctctgtcaagctctgtaaagctttgaaagttagctggttgtttgctccagctaataattaaggaacatgaaaaggatgccatattattgcatgctcctttccaaatctctttgttccatccagtcctcaaattcatcccgacggatcctaacccgactgccaacttttattaccgtaaactttcctttatccgcccatttgttgatcatgcttctgctgacctttgccagataggaagcttcatcaaaagtaagatactttatatttccattgcttccccgtattccggtttgtgataatttcttccgccggaaattagccagagcaatattctgttcctgtgcaagttcttcataatgctcagagcatgttttacagtggtcaaaagcaaatttttttacttttttctgaaattaagtaaagaatcgggttgcctatacatagttttcactttcaaaaaataaaaaaatttttgtttttgaaagcgacatcttgcatatactattagcagacagtatactaagtacaacaaagcggtttcgaaaaatgaaaaaacttcaatttttgaaagtgggtgactaaatgaaaacaatcacgagagcaaaatatctcgatagaatcattgaactgaatggcactcctgacatcaagatcatcacgggtattcgtcgatctggtaagtctaaactgatgcaggcatatattgcgtatctgaaaaacaactttgaaaacatcaatattatcttcattgacttcatggatttagcgtatgaagaaatcaaggaataccatgccttacactcctatgtggaagaacattatcaggaaggcaaaacgaactacctgtttgtagacgaggttcagatgtgtcccaagtttgagctggcaatcaacagcctgtactctaagggaaaatacgacatctatgtaacaggctctaatgctttcctgttgagtgcggatctggcaactctgtttaccggacgctatattgaaattcatgtgtttcctttcagcttccaggaatattgccaatattatgatgatatcagtgacaaagataagctctttgatgagtacgctatcaagggcggtttagcaggttcctatgcttatagaaccgaaaaagacagaacaaactatatcaaagaggtctacgaaactattgttacaagggatttggtacagaaatataatctccctgacactttggttttacaacgtctgagcgagttccttatggataatatcagcaacctgacttctcctaataagatcagtcagctactgacagcaaatgaaactccaaccaatcatgtaaccgtcggcaaatacattaagtatttgtgcaatgcttttgtattttatgatattaagagatacgacatccgaggtaagaaataccttgaaagctctgaaaaattctatttgtgtgacagcggtattcgatatgcaatactggggagcagaaatatggattatggcagagtatatgaaaacatcgtatgcatcgagcttcttcgccgtggatatgatgtttatgtcggcaagctttatcaaaaggaaatcgactttgttgctcagagaggtagcgagaagttttatattcaggtcagcgacaacatttccgggcaggaaacatttgagagagaatgctctcctctgcttcagattcgagatgcttatccgaaaatgattattgccagaaccaaacatccccaatatagctatgaaggaatccaaattcacgatatagccgattggttactacaagaataaataaggcgaaatatctccgtcattctcttttgaaatgttggatactttgcaataatacagtaaccatagatactgattccttcggcactagcttctgcagccttcacagataccggaatcacgctctcaaatatcggaatactggttccgtattgttccaagagatcaataacatgaaaccagatattgaggaactgcgcagaaaatatatggataatccacctgaaggcatgacgtccatggacattcgccgtatgagcgaggataaacttctggatatggattatttcctaaatgaggatgaattggatgattattttggcgaagaaggtttctacatcttttaataccagtaggtagtgtaaaatagtttgtgtttttggcaaaaaataactcctttttggtaagaattcagatatgacaattcttatcgaaaaggagtattttttatggcagttgcaaaggaacaaattcgacagattatctcagaaaacaacattaatacttaaatagtaatcaaattccatatatatttttataaaatagaaacgacaggtccgaaacccttgattttcaaggattctcgtcctgccgtttttcatttccatagtcaggcggataaaatcatccgcttcgctacacagctctacaccgaataactgctccgcaggggacttacttgattcggttaaattttacgagattataatcccactcgtccctatcaggaagctgcttacagattcttaattcgttcaattgcttccagtgtattctcatgggttccaaacgcagtgagacggaagaatccctcaccatgagcaccgaatcctgagcctggagttcctacgatgttggctttttcaaggagatagtcaaagaactcccaggaagtcatcttatcaggtgttttcagccagatatatggagcgtttacgccaccggatacggaatagcctgctgatgccagaccttcgtagatggccttggcgttgctcatgtagtaacctacctgttctttcagctgtgcttttccttcaggagagtatacagcctctcctgcacgctgtacgatatatggcgcaccattaaattttgtgccatgacgtcttgcccagagactgtggagatctacaccgtcacgaaccagatcctttggtacaactgtaaagccgagacggacacctgtgaaacctgcatttttggagaagctgcgcagttcgatggcgcaggttcttgctccttcgcactcatagatgctgtgcggtacattttcttcggagatgtatgcttcgtatgctgcatcatagataattacagaaccgtttttatttgcatagtctacccattcctgaagctgcggtttggtgatcgcaccaccggttgggttattcgggaagcaaaggtagataagatccggtacttcttccgggaattccggaaggaagccgttggatgctgtacatggcatatagattacgttatcaaagttgccacgttctttgttgtattctcctgtacggcctgccattacgtttgtatctacatatactgggtatacagggtcgcacactgcaatcttgttatccagtccgaatatttcctggatatttccggaatcgctctttgcaccgtcagatacaaagatttcgtctgcttcaatgtcacagcctctgtctttgtagtcattctttgcaatggcagatcttaagaattcataaccaagatcaggtgcataaccatgaaatgtagctgcatcacccatttcatctacagatttatgaagtgcctcaatgatcgccggagccagaggctgggttacatcaccgattcccagtgagatcacgtttgcctgtgggttggcttctttatatgcttttactttttttgcaattgtggaaaacagatagcttcccggtaatttcagatagttgtggtttactgttaccatgtttgatttcctccctggcatgtttcgcagtttttatatacctgtctacagcaggctgctgctttgcctttccatttctatttgtgtcttttctgcaaatatattttattcgagttttattatacttaattatttaataatgtaaagtctcaaagtgttttctgagaataatttttaatattaacattactgttcactggtaatatattaacattttttaccccgggcataatgtccggggtgatttattttatttgcgcttctctacttctttcattagtgtctcgcggacgcttgcaggatttgccttgcctttcatctctttcatgatctgacctacaaagaagcccatgactttatctttacctcccagaagttctgaaagtggtcctgggttagcatccaggatcctgttgatggtttcttccagaagtcctgtgtcttctacaatcttcagaccatgttcctcaatgtagactacaggatcaatgtcttcctcaaagactttctcaaagacttttttggcattctgagggctgacttcggatttttctaccattaccagaagatctgcaagatgcttcggtgagaaagatacctgttccgcatccatagctttatcttttgtcaggcggagtacctcacccataaaccagtttgctgtcttctttgcatttccgtagattgctgctgtttcttcaaaaagacctgcaagatggcgggattctgtaaggattcccgcatcgtatgccggaagtccgtactcttcctgataacgggcctgtttcacttcgcgaagctccggctgttctgctttgatcttttcaatccatgcatcagagatatggattggaggcaggtcaggatctgggaaatacctgtagtctttggcatcctccttggaacgcatggcgtaagaatattctttgttgtcatcccaacggcgtgtctcctgtgtaactgccttgccttcttcgatcagttcgatctgacgttctctttcgccttcgattgctctggcaatggctttgaaagagttcaggttcttcatctctgttctggtaccgaattcttctgctcccacttcacggacagaaaggttaacgtctgcacgcatggagccttcctgaagcttacagtctgatacacccagatactgtatcatacaacggagtttttcaagataggcgattacttcctcagagcttctcatatccggctcggatacgatctcgatcaacgggacaccgcttcggttatagtctaccagggagcagtcttcccattcatcatgaatcagtttacctgcatcctcttccatatgcatttcatggatgcggattttctttttgcctgcagaggtttcaatctctacccatccgtcatgacagattggcagatataactgagagatctgatagttctgtgggttgtccggatagaaatagttcttacggtcaaatttgcagtactgatggatctggcagtttgctgcaagacctgctttcagggcaaactctactactttcttatttaatacaggcagggaacccggcatacctgtgcagactgggcatgtatgtgtattgggtgctcctccgaattcagtggagcatccgcagaaaatttttgtttttgttgcaagttctacatggacttcaagtcctatgactgtttcgtactgtttcattatctggtgcctccttctcctggcacggcaaaggagccgcggctggtttcataggcgtgtgctgcacgcaggattttcttttccatgaagcagtctccgatcatctggataccgattgggagacctttgctgtcttttccgcatggaactgtaattcccggaagaccacagagattgactgctactgtgtagatatctccaagatacatggcaaggggattctttaagctttcaccgatcttcggtgctgtaaatggagatgcaggtgcaaggagcacatcatatttgccaaatgcctggtcaaattctttcttgatcagggcttttgtgcggagtgccttcagatagtatgcatcataataaccggagcttaacacgaaggaaccaagcatgatacggcgttttacttcctcaccgaaacctgctgttctggtctttttgtacatgtcgtgaagaccttcatattctgctgcacggaaaccgtacttcactccatcgaaacgttccaggttggaacttgcttccgcactggcgataatataataagccggaatcatgtattccatggttttgatagagaagaattctacttctgctcccagttctttcagcgtgtcaagaacacccataaaagatgcttttacttccggatcaagtccctctgccagatattcttcaggaactccgaatttcatccccttgatatctcctgtcagttctttggagaactgaagatcttctcttttcatggatgtgctgtcttttgtatcatgtcctacgatgatctccagaagagctgcacagtcagatacgtcttttcctacaggtccgatctgatccagggaagatgcataagctacaagaccataacgggatactgttccataggttggtttaattccggttacaccacagtaggaacttggctgacggatagatccgcctgtatctgaaccaagtgccagataagtttctcctgctgctactgctgcacaggaaccacctgaagaaccgcctggtacatgttccagattccatgggtttctggtgatgccgtaagcggaggtctctgttgtacttcccatggcaaattcatccatgtttgtttttccgataatgaccagtccggctttttccagacggtcaatgacttctgcattatactgaggcacaaaattctcaagaatctttgatgcacaggtagttttctttccgttaatacagatattatctttgatcgcgatcggtacgcctgcaagaggactggtataagtaccgtcctcgatgcctttctgtacttcttctgcacgtttgtatgcttcttctttatatgtgtcaagataagcgtgtacttctgaatcctgtttctcaatctgttcaaaaacagtttttactccatccaggacgctgacctgacgctgtcttattttttccccaagctgcagggctgttaatttctccaactccattgtcctgtctcctatcctatggttttcggaacctgatactgtccttcttttgctttcggtgcatttgccagcattgcttctttgttgtctccgtttgtgacaacatcctcacgaaatacgttttcatcctggaatatatgggacataggctctacttccgatgtatccagttcatccagtttctctacataatcaagcattttctgcatttcagcttttgctttttccttttcttcttccgagagggaaagcttggccaggatgcagacattttccattgtttcatcatctatgatctttgccatgattttctccttatatatactgcctgtaacattctatattgcttttatttctttctgcccggaatcaacctgccgtttccggtcaatatataggcagctttccaagtttctgacttatttacggttccagacggttcatatctcgcgggaagagacaggtttcacgaacattctcttcaccgataagctgcatggtcagacgttccagaccgattcccagtccaccgtgaggcggcataccatgtttaaaggtatccagatactgttccatgccttcctgcgtcatacctctgtcttcaattttctgtaccagcatgttgtaatcatggatacgctgtccgcctgttgtgatctcaaggcctttgaataacaggtcaaagcttaaggtaaatcttgcgtcttccggatcatccattgcatagaatggacgtttctttgacggataatgtgtgacaaatacgaaatctgagccatattcttctttgaaatactgtccgatcagtgcttcttcttccggctccaggtcaaatggatttctgatcttacggttatatttctgtgataccagttccttggctacatcgaaacggactgccgggattttggatacatccgggatctcaagcttcaaaatctgtacttcttttgcatattctgttttcagaaggttcatggcatactgcaggaatcctgtttccattgccatgatttcttcgaagctgtcaatgtatcccatctcgaagtccagactggtgtattcgtttaaatgacgtttggtgttgtgtttctctgcacggaataccggacctgtctcaaatactctgtcaaatacacctaccatcatctgtttgtaaaactgcgggctctgcgcaagtactgcaggtttgtggaagtagctaaatttgaaaaggtttgccccaccctctgctcctctggctccgatctttggagtgtggatttctgtgaatccctgtccgtaaagataatcacggaatgcttttgtcagtgcctcctggattttaaatttggaacgctcctgaatatttctcagggaaatcggtctgtagtttaattttgcttccagggaagtgttcagtttccatttgtcgattgccattggaagtggctctgccggtgttgataaaatatcaatatgacggatacgaagctctcttccgtggggtgctctctcctcttcatgcaggattcctttcaccctgatcgtcattgcttccttcaattcatgaatggaaacatttgccatttcattttcatagactgtctggaataagccttcccttcttctaagaatgataaatgccacatcacccatattacggatgctgtgaacagcgccttcgattacggcttcctggttcaggagattattacctacgagttcctcccaggtattgatttcttttttccatgttccatccataaattccatttcctcatcctccatttcttcatttctgaaaacctttgtgatatcttcactggtttcaagttcaaaaggcttttcgtgcaagcacaacgactttttggcttaaaaccctggaatatcaaaaaggcgtaatcagaaaatccggagacacttatcccctggactctctgattacgcctttgtaatcattcttcctgttattatctattttatgtttgtttgtgttctttctatatataatataatgttagggttaaaatgtattttgcctctaacttgatatgaacaaaaatatattctgtatattaccacatattctgtcaaaataatatcgtcattttttacaaaatttttcttattattttcggatattttatttagaacgtgtttgaaaaatcagatttcatcatacatcagcatgagtaacatctgtgcagtttctaccatgttggttcctgaatccatgctgcatttctggatgtgtcgatatgcttcctcttctgtcatctggtttttttccatcagaaggcgtttggcattcgagatataattctgttctgtttctgatctgggctttggtttctttttttcttttttaatccggcgttccagatgatagagcatgtcattgaccgtatctatcagtgcgcttgctttcatcggcatctgtacagtgctgacggaattcggtgcttcatctataatacgctgagaagccagaagcagcatttcaaaatactgtggcaggtcatcgagagcgtctttataataggcatctgtcagcttatacccgcatatcaggacaccactgtcaagttctgagatactggccagcgcattagagacagagctgcagacagaggctactgttagcccatgtctgttaagtattgtgcggattttctttgcgtcttcaattttcggtaacgcaatcacaatgctgctgctcataactctgccactcctatttctgttacagcctgagtttccgtccactgcttattgctttttgcaacctccgcaggggacttgtttgattttgatcaagcggatgttcgcaatccgcttcgctacttgctcataaccgaataactgcttcgcagtttatcagaaggagcttcgctcctcctgatacaaacaagtccccacccactgcttattgctttttacaatttctacaggggacttgtttgattcggttaaattctgtataagtattcctcgatttcccaggctgaaatttctcttgtatagcgcagccattcttttttcttggctgctgcgtattctttacaaaattctgttccaagtacttctttgatccagtcactctgttcgaagtaatcaattgcttcgttcaaatttcccggaagattttcaatcttcattgttttctgatctgtttcggataactctctgctggaggacttagtcggataaatcttcttattgattccatccagtcctgctgccagacatactgcaaataccagatacggatttgctgctgcatccggacttctcagttcgatccttgtctccatacctctggatcccggaattcttaccagtgaattctggttgttcttcgtccatgtcagttctgtcggtgcttcatagcccggaaccagacgtttgtaggaatttacgataggattggtgatcagtgccatctctttgctgtgagccagaagacctcctacgaagtaataagcttcttcgcttaattcctgtggatttcccggattaacgaatacatttcttccatctttaaataaggagaaatgaatgtgcattccggagccgtttacttctgcccttggtttcggcataaatgtcgcatgaagtccatggcgtttggcaatggtacggaccgtcatcttgaatgacatgatccgatctgcaatcgtacggacttcaccgtatttgaaatctacttcgtgctgtgcaggagcagtttcatggtgagaagattctacctcaatccccatatcttccagatttaatacaatatcacgtcttgcgttttcacccagatccacaggactgacatccagatatccggccttttcatgtgttacagtagtcggaactccgttatcatctgtatgaaaaaggaaaaattcacattccggatctaccagacaggtgtatccctccttctttgcctcccgggcggttttcttcaggatatatcgcggacttctctcatgaggggttccgtccggacaatagatatcgcataacagtctggcaactttgccctgctgtggtctccatgggagaattgcaaaggtgtcaagatccggtcttaagtacatatccggttcggattctcctgcgattcctgcgataaaggaaccatctacgatacatcggttatccagcgcacggggaagttcccgggcagttatggcgatgtttttcagcgttccgaacatatctgtgaactggagacggataaattccacgtcttcctcctcagccatctgtaatatttcttctctggtataattccccattttcattcactccttgtcagcatagtttctgctgttttttgctttcttaataattcttcgatataatttgttttctgtctgcagaatactcctcttgcgatggattgcgcagaggcataattcctctccgccgcagtgtaattctgtccagaggactttttatgttatggaaacattacggaataatttcatataacataaaaaatggcgcactttctacagttacttttctatagaaagaacgcctttgttcatgtaggcaattatagcaatgtaccttttctttgtcaactgctatgattgattttcttctacagattttcctgcacttttcttgttttgactcgaatcctttttttcctctcttaggtcaagcatattctttccttacattgaccctattcacgcttttctcctcttaggtcaagcatatttttcccttacattgactctattcacgcttttctcctcttaggtcaagcatatttttcccttacattgaccctattcacgcttttctcctcttaggtcaagcatattctttccttacattgactttaattatcgttcttctaattcaagtcactcgcaagcttttcttatgttgactttaattaaggttttcttgtttcaagtcatccatgaccttatttcaagataatctggatcagctttttcaaatacactttaacttaaaaaaggtgttatcgcctaataatcattcattaagcaacagcacctttttcaaacttctcttcttattatttacagataggaatatcccatcagcgattcatctaccgctttcgcagcttctctgccctcgcggattgcccatactaccagggactggcctctgtgcatgtctcctgcagtgaagactttgtctactgaggtctgatactgctctggttttgtatctacattggttcttccattgatggctaccttaaatgcgtctgttacatatttctcactgccaaggaaaccggctgcgataagaactacatctacagggatgacttcttcgcttccttctacaggaaccatcatcatacgtcctgtctttggatctttttcactctttaattttgtgagttttgcctggcagacatttccgtttttatctttgataaattctgtaacagtagtctggtatactcgtgggtcatgtccgaatacagcgatagcttcttcctgaccataatctgttttgaggactctcggccactgcggccatggattggatggtgttctttccactggcggcttgggcatcatctctaactggatcacagatttggcacccagacggatagatgttcccacacagtcatttcctgtatcaccaccaccgatgaccagaacattttttcctttggcaagttcatatggaactttggcaaaatcagagtccaacagcgcttttgttacctgtcccaggaaatctactgcgaaataaattccttttgcatcccgtcccggaactttaatgtctcgtggattggatgctccgcaggcaaggataacgcggtcgaactgtttcagaagttcttctgctttgatgtcctttcctacgtttacatttgtaacgaatttaactccctcttcttccataagatggattcttctgtcaacaacagctttgtccagcttcatgttaggaataccgtaacggagaagtccgcctacacggtcttttctttcaaatacagttacgctgtggcctcgtctgtttaactgctgagctgctgccagtccagacggaccgcttccgatgactgcgatggatttgcccgtacgcacttccgggatctgcggagttacccatccgttctcgtaggctgtctcgatgatcgcacgttcattttcttttgtggagaccggttctccgtttaagttacaggtgcaggctgcttcacagagtgcagggcagacacgggaagtaaattccgggaaactgtgtgtcttgctcagtcttaagaatgcctgtttccagttgcctgtataaaccagatcatttgtctcaggtacaaggttgtgcagagggcagccggatgccataccgccgatcatcatacctgactggcagaatgggacaccgcatgccatgcagcgtgcgccctgaagtttctgtttttctttatttaatggggtcctgaattctttgaagtttgcgatgcggacctttggcggcagaacttttgccgtctctctctcatattctaaaaatcctgttggtttgcccatgatttcctcctcttcgccacacttgctgcggcaataatggtatggcccacgccacctttttatttattctaaaagatgacggggcaacattgataagttcacacgatatattcaattattatcaatgtttagcgccaatactttcatagaacgcttccatctgtgcctgctgactgttgagtcctttttcttccagtttcgcacttaaagtgatcatcttcttgtactcattcggaatgagtttcttgaagtgtggcagatagtaatcaaagtcagcgagaactttcgcaccgagtttggagcctgtagcttctacatgggcttcgatcaggtcgcggagttcttttttgtcatatttgttttccactttttcgatggaaatcatagccttgttcaggttcttgtaaagaacattatccacatccagtacatatgcgataccgccgctcatacctgctgcaaagttcttgccagtcttaccaagtacgactacgcggccacctgtcatatattcacagccgtgctctcctacgccttctacaactgcagatgcaccggagttacgaactgcgaaacgctcacctgcaacaccattgataaatgcagtaccgctggttgcaccgtaaagggcaacattgcctacaataatattctcttctgctttgtatgcagctttctccggaaccttcaggatcagtttaccaccggaaagtccttttccgaagtaatcattgctgtcaccggtcagttccagtgtaagtcctttggggataaatgcaccgaagctctgtccgccggcaccgttgcagtgtacagtgatggtgtcatctgcaagtccgtttttattctttctggtaatctctgcaccaaggatggttccgaatgtacggtcaatgtttgtcaggtttacagaaagctctgttttctgacctttattgatggcatttgcgcatttcttaaccagaaccttttcatccatggtcttttccagttcgaagttatatacggctttcgggtcaaaagtaactttctggtctttgcctgcgaacggattgttcaggattgcacttaagtctactttgccctgatgtggttcctgtacgttgtctgtctgaacaaggagatctgtacggcctaccatttcactgactgtacggaatccgagcttggacatgtattctcttaattcctgtgcgataaagcgcatgaaattctctacatattccggtttacctttgaatctcttacgaagttcagggttctgtgttgccacaccaaccgggcaggtatccaggttacatacacgcatcataacgcatcccatggttacaagcggagctgttgcaaaaccaaattcctcggcacccattaatgctgcgatcgcaacgtcacgaccactcataagcttaccgtctgtctcaatgcggacacggtttctcagaccattcttgagcagtatctgatgtgtttctgcaagtccaagttcccatggaagtcctgcattgtggatagaacttctcggagctgcacctgtacctccgtcataaccagagatcagaatagtttgtgcaccagcttttgcaacacctgctgcaactgtaccgacacctgcttcagataccagtttgacagaaatatctgcatatttatttgcattcttaaggtcataaattaactgtgccaggtcctcgatagaatagatatcgtgatgcggtggcggggagatcaggctgacacctggtgtagaatgacgggttttggcaatccatggatataccttctttgcaggaagatgtccgccttcaccaggttttgcaccctgtgccatcttgatctggatttctcttgcagatacaagataacggctggttacaccgaaacgtccgctggcaacctgtttgattgcggagcatctgtcatcgctgcttcctgcagaatccagtctctcgtcactttcaccgccctcacctgtattagattttccatggaggtgattcatggcgattgccagtgtctcatgtgcttcctgtgaaatggaaccataggacatggcacctgtcttaaatcgttttacgatatcatctacgctctccacttcttcaagtggaaccggagtctcagcaaacttaaagtccagaagtcctcttaagtttccgtggttttctttatctaccagatctgtgtactgtttgaacagatcgtagcttccagtccatgtggactgctgcagaagatgaatagtctgaggattgtaacgatgttcctctccctggcttctcatcttgtgtgcgcctacgctgtccagtgttaggtctgtcggaagtcctaacgggtcaaatgcttctgagtgaagcttctctacattctcttcgatgtcttccagtgtgattccgcctacacgactgactgtaccagtaaagtatttctcgatcacatctgaggaaataccgattgcctcgaagatctgagatccctgataagactggatggtggaaatacccatcttggaagcaatctttacaataccgctgatgactgcatgattgtagtcatctactgctgcataatagtctttctccagcatatggctgtcgatcagttcatgaatggtctcaagggcaaggtacgggttgatggcacttgcaccgtaaccaagtaaggttgcaaagtgatgtacttctcttggctctccggattccagaatgatggcaagagaagtactcttctttgtttttacaaggtgctgatgaactgcggatactgccagaagtgacgggattggcatatgattttcatctactcccctgtctgaaagaacaaggatgtttgcaccctcacggaatgctttatctacttctacgaaaagacggtcaatagctctctcaagcttggtgctcttataatataaggtagaaacaactgctgtcttgaagccctcatgcttgaagctcttgatcttcatcatgtctgtatttgtcagaatcggattgttgatttttaatacctgacagttttccggtttctgctccagcaagtttccgtccttgccaacataaacgcttgtgctggtaacgatttcctcacggattgcatcgattggaggattggtaacctgtgcgaagagctgtttaaagtagtcaaataatggtctgttctgtttggaaaatactgcaagtggagtatccacacccatggctccgatgctctctgctccgtttaatgccatgtttctgatggaagtacgatactgctcataagtataaccgaatgctttctgcagacgcgctctctgctctggtgtgtactcttccggtctctcattcgggatcttgatatcctttaactgtaccagatgactgtcaagccattcaccgtatggctgcatttttgcgtagccctctttcagctcattgtcatcgataacttttccctttacagtatctaccaggagcatttttccaggatgaagacgctcttttaatacgatcttctcttccggaattggcagaacacctacctctgaggaaaggatcatatagccgtcagaagtaatataatatctggatggacggagaccatttctgtcaaggactgcacccataacatcaccatcagagaacaggatagatgcaggtccgtcccatggctccatcatagttgcatagtactgataaaagtcacgttttgcctgggaaatggtatcattgtttgcccatggttcagggattgtgatcatcactgcaagaggcagctccatgccactcattaccaggaattccagtgtattgtcaagcattgcagagtcggaaccatttctatttacaacagggagcactttatgaagctgtccctccagatatggtgattccatattttcttctcttgcaagcatcttatctgcgttgccgcggatggtgttgatctcaccgttgtgtaccataaagcggttaggatgtgctctctcccagcttgggtttgtgttggtactgaagcgggaatgtaccatggcgattgcagattcataatccgggttctgaagatcttcgaagaaagtacgaagctgtccaaccaggaacatacctttgtaaacgatggtacggctgctcatggaaactacataagtattatcattactctgttcaaactcacgtcttgcaatgtagagcatacggtcaaatggaagacctttttccacatcttccggctttttgataaatacctgcataatacatggcatacattctcttgccttgtgtccaagcacttccgggaataccgggacctgacgccatccaagaagttccaggccttctttctcaagaatgatctcaaacatcttctttgcctgtgcgcgtttgatctcgtgctgcgggaagaaaaactgtgcgatgccatattctctctcatcgccaatctcaaatccctctttcttacaggctttcttgaaaaatttatgggaaatctggagaagaatacctacaccgtcaccggttttgccttctgcatccttacctgcgcggtgttccagatgttctacgatctttaatgcatttgcaacagtatcgtgggttttcttgcctttgatattgacaactgctccgataccgcagttgtcatgctcaaattcaggcctgtacataccttgctgttgctgctgttctctcacttctttcataatctcctcatcctttctatttctgctgctgttcttcgcttattttcttatcgacggccgcctggatgaatcctctgaataaaggatgtgcatgattcgggcgggatttgaattccggatgggcctgggttcctacatagaacggatgccctgcgatctcgatcatttctacaatatggttatcaggggaagttcctacgatattcattcccttctcctgaagttctttacggaatgcattgtttacttcataacgatgtctgtggcgctcatggatttcttttttgccaaagagttcataggatctggaaccttctgcaagaatacatggatagcttccaagtcttaaggttccaccgatatcttcgatatcttcctgatccggcattaacgcaattaccggatgtttagtttccggattcagttcaatactgtttgcatcttcgtatccaagtacatggcgggcaaattctacgattgccatctgcattcccagacagattccaagatatggaatcttatgtacccttgcatactgtgctgccaggatcattccttctgtacctctgtttccgaaaccacccggaaccaggataccatctacattgtgaagctgctgatccagatttttctctgtcagttcttcggaatcaatccagtcaagctctactttggctctgcaggaaattccaccatgtttcagtgcctctactacactgagatatgcatcatgaagctgtgtatattttcctacaattgcgatctttactgttttattcggatttctcagactttctaccatttcctcccagtcacttaaatccggttttctgttttccagacggagacttgaaagaactacatctgcaagcttctctctttccattgcaagaggagcttcatataaatattccacatccaggttctgaagtacatgtgatacaggtacgttgcagaataaagcaattttttctttaatgtcctctgtcagctcatgttcacttctgcacaccagtacatccggctggattcccattccctgaagttcctttacgcttgcctgtgtaggttttgttttcagttcttcagatgcctttaaataaggaattaatgttacgtggatcaggattgcattgtcatgtcccacattgagctggaactgacgaattgcttccaggaacggttggctttcaatatcaccgactgttcctcccacctcgataatggcaatcttgttttcctccggtgatttggcgcggtagaaacggctcttaatctcatttgtaatatgaggaattacctgtacggtacccccgccgaaatccccgtgacgttctttctgaagaacagaccagtaaaccttaccggttgtcacattggaatttttatcaagactctcatcaatgaatctctcataatgtcccagatccaggtctgtctctgtaccatcgtctgttacaaaaacttctccgtgctgaatcgggttcatggttccggggtcgatattgatataaggatcaaacttctgcatggttacctggtatcctctcgctttcagaagacgccccagagatgcagctgtgattccctttccaagaccggaaacaactcctcctgtaacaaatacgtatttcactgccattttgatttcctcctccatcatcctttgttaataaaaaagcgtcagatgcagctatcagagggcacttgacccatctggtattctgcatctgacgcctttgtcagatcatcatatcttctataataatatgttcaattggctttctttaaaaatatgctatactataaaacattttttttcgtttgtcaataatgaatttcccgtttttaagcaaaaacaaatcaaataagttccttctgataaactatgaagcagttatattttatggaattactctgaacacagtcataatacagaaaaaacgaatctgtaaaaattcatcttccagacccgtcttctctgcgataattattcggttataaaaatgtaaaatttatgcaactgcaaatttcttcaatgtacgatcaaattctcggctctccccgtggcagtctactgtcagttctctggtcagatccagactaagtacaccaaggattgatttggcatcaattaaaaatctgttgtaataaacatcaatatcaaaatcacatctgcttgcagcattcacaaattcctgcacctcttcagttgcatttaacttgattttactctgtgacatcgtgatcaccctttctgaaaacattctttgtttttttctatcagacgcccatattatgttccacatttcagaatttgtcaagtttttaaatttatccaattttcataaagcgcaggggttctattgtgcattttgttcgtttatatatgttttcacagcattattttatacactatgtatgattccattctatattggttttaccattatgtgagattgattccatatatcatcgacaggtttctgcattttttatgaatttttgcgacttaacacttcacaatatctgcaaactccgcatttgtataatccggaatctccatcggataatttccatcgaagcatgccttacataagggcagaccgcccgccattccttccagataatctgtctgcatgtagccaagagaatctgctccgatcattttacagatttcctctgtgctgtggctggctgcaatgagctgatcatttgacggcacatccgttccgaaatagcatggatgtaaaaatggcggtgaactgatacgtacgtgcacttcctttgctcccgcctcttttaacatgtggatcaggtttgcaatggttgttccacgaacaatagaatcatccaccagaacaatcctcttatcttttacaacagattccagcacactcagtttcagatgaacgctggactcacgttcttcctgagtcggtttgataaatgttcttccaatatagctgtttttatagaacgcaaatgcaaacgggattcctgatgcttcggagtatccctttgcagcagggagtccggactccggtacacctgttacaagatctgcctctacaggatacgacttggcaagagatttacctccgcggattctggcatcatagaccttcaccccatcaatggtactgtcaagtcttgcaaaatatatatactcaaacacacaatgcgcgcgttttgcagcagcagacgcaagctctttatttgacttcagtccgtcttttgtgatcgtaagaatctcacccggctcaatgtcacggataaattccgcacttacagatgtcagagcacagctctcagaagcaataacataagcatttcctcttttaccgagacacaatggtttcagtccatatgggtcgcggactgcgatcagttttctcgggctcataactaccagaccatatgcacctttgatcttctttgcagtctttagcactgcctcttctactgttttagaatgcacacgttctcttgcgatatggaacgcaataacctctgaatctgtagttgtatggaaaatcgctccattctggatcagttcccatttcagttccggtgtattaaccagatttccgttatgtgcaagtgcaagagttccctttacataagacaaaacaaggggctgtgcattctctgcaacagaagctcctgttgtggaatatcttacatgaccaataccaatatccccctcatatttacggacaacatcctgtctgagaacttcacttacaagtcccagatccttatgaaacttcacatttccacgctctcccttagtatcagaaactgcaagtccgcaggattcctgtcctctgtgctgcagggaagtcagtccataatatatggacggaactacattgccgccatccagatcataaattccaaagacgccgcactcttcttttattccagccatctgatttcctccgatcgtattctcttgtctgactttaactttactttcaaaacccgctgacattgttttcttatgtttggcgggttccaaaatcaaattataataatagaaacaaatttgtcaacctatcctttttttgtcatatctcaaaaattttttctgaattttttcaaaaaaagtgcttgacatctgttttcatttcgtttatagtacagcacataaagcaaaggcgctttggaaagatctacagagatcgcatccagggcgcctttttcgttttataaaactttcgtttcatagaaaatgttcgatgaggaattttctatgagacgaaaaccgcaggcagtcacaatggtgatctgtagcggcactacacatattcagaaaatattgcaaaccgaaaggagagtacctatatggcacagaatatccctgaactgtacggcagcctggtcttcaacgacaaagtaatgagaagtaaactgccaaaagacatgtacaaagcattaaagaaaacaatcgagagcggtacacaccttgaacttgatgttgccaactccgttgctgttgcaatgaaagaatgggctaccgagaacggcgccactcattatactcactggttccagccaatgacaaacgtaactgcagagaaacatgacagtttcatttctcctacaggagatggtcaggtgatcatggatttctcaggtaaagaacttgtaaaaggtgagccggatgcttccagtttcccgtcaggcggtcttcgtgccacattcgaggcaagaggatatacagcatgggatccgacatcaccggcattcatcaaagacggaaccctttacattcctacagcattctgctcctacagcggagaagctcttgataaaaagactcctctccttcgttccatgcagacacttgataaagaagctacaaaccttctccatataataggaaataaagatgtcaaacacgtaaatacaactgtaggtcctgaacaggaatacttcctggtagacaaggaattatacaaacagagaaaagaccttgtattctgcggacgcacactgatcggtgctcctgctcctaagggccaggaaatggaagatcattacttcggtgctctgaaacctcgtgtcgcagcttatatgcatgacctggatgtagagctctggaaacttggtattcctgccaaaacaaaacataacgaagttgctcctgcacagcacgaattggctcctgtattcgatacaacaaacgttgcggttgaccacaaccagttaacaatggaagtaatgaagaaagttgccgacaagcacggacttgtatgccttcttcacgagaaaccatttgagggaatcaacggaagtggtaaacacaacaactggtctatgattacagatgccggtgtaaatatccttgatccgggaaaaacacctgctgaaaatacacagttcctgattttcctgacagctgttatcaaagcagttgatgaatacgcagatgtacttcgtatttctgtagcaagtgcaggaaatgatcaccgtcttggtgcaaacgaggctccgcctgctgttgtatccgtattcctcggtgatgaactgacagaagtattaaaatctatcgaaaatgacgaatattttgcaggaagccgcgcagtccagatggatatcggtgcaaaagtacttccacatttcgtaaaagacaatacagacagaaaccgtacttcaccattcgcatttacaggtaacaaattcgaattccgtatgcttggttccgaagcttctgttgcaaacccgaacattatcttaaacactgctgttgctgagtgtgttcaccagtttgcagagcagttaaaagatgtaccggaagacaagatggaggatgcaatccacgaactgatcaagaagacaattattgatcataaacgtgttatctttaatggaaacggttatacagacgaatggatcgaagaagctacgaaacgtggtctctttaacctgaaatccacaccggatgctcttcctcagtggatcgcagacaagaatattgaactctttaccaaatatcatatcttcacaaaagaagaaattgaatcccgttatgagatctggctggaatcctattccaagattcttaacattgagtccaatactatggttgaaatggtacagaaggatttccttccatctgtattcgcatatatcgacaaagttgcagctactgctgttgctaaaaaatcagttgtttcagatgtcagcacagcttctgaaggaaaactgatcaaagagctgtcacagcttgctgatgagatttccacaggtcttgagaccttaagggcagacactgccaaagcacttgctacagaagatcctctggctaatgcaaaagcataccagacagttgttctttctgatatggatgaactcagaaagtctgtagatgcagcagaaactctgattccggatgcactgcttccatatcctacatatgacaagcttctgttttccgtttaattaacaggtaataacaggggaatatctttatgaactctacttcataattcattatcgatttcctcatccattaatcacacgatattttgatattcccctgttttacatataattttgattttaaactgcattgcatacagtcatacgaaatgtcttttctattacatcagttatgcaatacactataaatatggattttatattcgcaaaagcgcgatgaactggctacatttccaggcattgcgctttttgcattttataaaatatgaggaaatttttatgagggaggaatattattatggaattttccgcagtaaacacaatatgggtgctggtcggcgccgcgctggtcttctttatgcaggccggattcgcaatggtagaaacaggcttcacacgagccaaaaacgcaggtaacattattatgaaaaacctgatggacttctgtatcggaaccccggtcttctggctggtcggcttcggtctgatgtttggtgcaggtaatggatttatcggaaagatcggtggtattgcaacagaagcacactatggttcaggaatgcttcctgacggagttcctttctgggcattcttaatcttccagacagtattctgtgcaacatccgcaacaattgtttccggtgcaatggcagaacgtaccaagttcctttcctattgcgtctacagccttatgatcagtcttgttgtatatccggtatccggacactggatctggggcggtggatttatcagccagatgggattccacgatttcgcaggttcctgtgcagtacatatggtaggtggtgttgcagctctgatcggtgccatcatccttggacctcgtatcggtaaatatacaaaggacggcaaatcaaaagctatccctggacacaaccttacagttggtgctttaggtgtatttatcctctggttctgctggttcggatttaacggtgcttccacagtaagtatggaaggcgatgcaatcgtaagtgcaggtaaaatctttgttactactaaccttgcagcagctgttgcaactgtaactgttatgatcatcacatgggtacgttacaaaaaaccggatgtttccatgtctctgaacggttctcttgcaggacttgtagcaattacagcaggatgcgacacagtttctcctacatccgcagcaatcatcggtattgcttccggttttatcgtagtatttggtattgaatttattgacaaagtcctgaaaatcgatgaccctgttggtgctgtcggtgttcatggtttaaacggtgctttcggtactcttgcagttggtcttttctccgatggatcaggcacagactggaaaggacttcttacaggcggcggcttccacggatttggtgttcagttcacaggtatgatcatcacaatcgcatgggttgttgttactatgacaattatcttccaggtaatcaaacatacaatcggacttcgtgtttcagctgaagaagagattgcaggtcttgactccaaagaacatggtcttgcaagtgcttatgacggtttcgcaatggctggcgttccgactcctatgggaacttccataaaagctcctgttgtcacagccagaccttctgctcctgctgaatcagttcccgaacttccgaaagaaggcgttcataaacttacaaaagttgttatcatcacccgtcagaataagcttgatgaatttatgcaggcaatgaacgagatcggtgttacaggtatcactattacgaacgttctcggatgcggtgtacagaaaggtgctccatcctactatcgtggtgttgagatggaaatgaatcttcttcctaagatcaagattgagattgttgtcagtctcgtacctgtacagaaagttattgaaactgccaaggcagtcctccataccggtcagattggtgatggtaaagtatttgtatatgacattgaaaatgtcgttaagatccgtacaggcgaagaaggttatctcgctctccaggatacaaaataaataagcaatcaataaatatcctgctataaggtcaggagcccggatttattccggactcctttttattgttcactaccattatgcaatctgggcagattccagcgataatgtgctgccagataccgaatcagtatgattacgaaacaggctaccatcatagcttccacatttcctacaaaacgattcatgtacacacatacaaccgctcctacaatagatgcgcatgcataaatatgctttacaaaaatataaggcggtactcctgccatcatatcacgcatcaggcctccccctactccggtaatcgttcccagaaataccaggagaaacacattatccatatatccactgcgaattcctgtattcactcccactaccgtaaaaattcctaaaccgatagagtccatcaccaacatgactctgtcataggtaagccgcatatgcccttccaaaagctgccgtttccagtaaaaagccagaaaaaccacacaggaagtaatggtagccaccaaggcatataccggatttgtaaacacattaggtggaataatccccagcacaatatcccggatcatacctccgcctacagctgtaactacacccagtacgctcacaccgaaaatgtccatattccgttctacacctaccattgccccggaagcagcaaaagcaaccgtacctgccatttccataaaaaaagttataatactctgataatccatattaacctctgacttttacattttagttcataaattatatcattttttataacttatgtgaagcaggatcctgcttttttagacatcttatttttttattttcttcacagacgctcccttaaacaaagctccgtctactgagaaacgatcaatcaacgtagtcttgggattctcaatcagatctatcagcttctccgcagctatcctgccaattgccgctgtgtcctgacaaagggtggtgagctttggctccagaattttcgcaatatcaattccatcataacctgcaatagaaatatcatcagacagccgcttcagtatcggaagaaccctgaactgcaacatcctctgtaatagattttacgctttcttttgtgtaatagcctctcgtacctgctcaacggacagcaatgtggtctctgcaattttatcaagatcatgctctccatttttccacatattccatgcgatttttttacttctgcttacttctgcctcatcacgttctctatctacaattacctgcatcgtcttgcacatatcagccactcctttcggttcctctttaaaatatcttactctcgcagctatttttgcattatgcatttcgtgataattaacacagttaaaatcatgcattagccagccaacctcatcatctcctctgtaagagccatttacatatacaatatgtgctttatcattaaacagtttccctgtttcctgtactgttctttctattgtataaatcggaagtccacctaccaacacatcattagacgttataaatatgatatatgtctctggcatctctgtatatttacttcctgatgttgtaagtctggtatcaaataatgagctgtttaatctggcacgttctggtactgccccactatcatcctgttggacctcgatatcgtactgttttccttcggaatcattagcgtatatatctaatctgacagatcgtccaaacaaatttccaatcgtcaactgtgtaacagatttcgttaccgtcagatcatctctttttaaaatgatcttcaagagttcctcagtacactctaaatcactggaaaacacctgtgtcataaacgtatcatccattaacgtaaacttgttaatggcgtccatgcgttctgtatttttctcgtctaaattcaacacctgcattcattcactttcttttcatattcttattataaatgctttcattatacttatgcaataagattttttcgacaaaacagtaagagaatcatgcatcctcttccaggtcttaaatggtattttttacttctgccatttccaacatcattgttacttaactacttttcctgtaggtgttaccccaatccggagaacatgtgaatacaattttccaccctttttctgtaccgctttgcaatttcccactgcatatattccggatggatagtgtgactttgaagtaaccgtaaaagtattagatgcattattatatcagttcatagatgtctgtttacactggctagccattatataagaacagtccccttaaaacccactgtaccatcgttgcattgtcactttttctgtatattctccactgctgtccatactctaccctgctcactgtcgaagcagcccttgttaaaattggctttgattcccactcattaatttcagcggcatattctgcgtctatattgtcgtcattagtggaaatcaaattcatggattcaattcctgcttctgatagttttatgttgtcatcctgcatagcagcttcaaaatctgcctctaatacttcggcctcactgtctgactgcgttgagccagtgctgtttccagaatatgaagtttctaaaaaatcatccagtcccagaccaattccatctttcatggccgattcaaaatcttgctgtagttttttatcgctcacgtctgcttgacactccgttgcgaaatcatcatcgcacattgctccttcatcaaaagaatataactccgttgattcatccgcatacacatctgccgcatgtacaggcacttccagcattcctatcaaagaaatcatcagtaaatatagtgtagcttttttcatgattttgtcatttctttctcttctattactgcatattttcagatttattaactgaattattgtgtttttccaaatctttaacacaaataataattcctcaatgtcatttagttaagcctgcgtgacaatttaaacagagtgttgttgaatatttgaacacactctgtttagacgacggctatacgataaatagtacaaatcttgcatcatcaccgaatatttcatttcatctcccgtaatggatgttcccatgtatccctctataaaatcgaagtatccattcgttccagcattcttttcccaagtatctatcgaagccttaatccttagcagacacattaccggaatcttatagtattgttgcattttctttaaatctaactcatgctgcctccctctggaaataagcagctcctttatttcactattcgtgtatggatcaaatgccataagcagggcagtttcaagccgttcattatcctcattgcgaaagtttcccgtgtcaaaactttctccggtacatcttgatttaatatcaaacaatacaagggcaattgcctctttcattcttctgctgtttgaagcgggaaactttcgatggatttttaacgcattactttccatcggcaaaagaagcatactgtaagtttcctcatcaccttttctgatttttccaaactctttttccatttgagagtatattttttcaaactgatataactgcatttttcttctctcttcctttagtttttatcctcatttttttcaaaaaacacttgacaggataagcaatatatgttgtgtaagccttgaatataaacacatttcaaggaggcaccctatgactcaaaactttttagctgacttaaaaacaacactcgaaaactgcattgctgaactggatgaacttcatttcatgttctgccaaaacccggaagctgatttcacaggaaatcgtaaactttctttccatgattatattcaatttatggttcaaatgcagagtaaatctgtttcaaatgaaatcctggatttctttgagcattcacttgcagcccctgcaaaatcttcttttacccagcagcatttcaaactccaaccggaaggatggagctttctgttccatatttttgtggaacagtgcagggaactttctgatcagccctatcacggctatcgccttttagcatgtgatggttccgatgtcaatatagcacgagacccagaggatgaaagaacttttatccatgaaggcgaaaagggttacaatgcgattcacgtcaatgctctttacgatatcatgaaccatacttactgtgattttctggttcagggaaaaaagaagcttcatgaacgtgctgcactgaataccataactgaccgttatcccgattctgtgccggcaattttaatggcagaccggggatatgaaagcttcaatgtctttgctcatcttattcaaaagaatatgaaattcattattcgcatgaaagacatcaacagtaacggcattctttccgcttatgatctacctgacagtcagttcgatacccatataaaaaccactcttaccagacgccatacaaaagaaactcttggggatcccaatacgtataccattcttcagcagactaccgatctggatttcctggatgaaaactgtacatattatgatatcgaattccgtattgttcgtattcttcttgataatgggacctacatctgcattgccacaaatctttcggaagaagacttccccttagaagagattaaaaagctttacagaatgcgctggagcgaggaaacaagctttcgtgagctgaaatacaccataggtcttgttaactggcatagcagcaagtatgacgggatccttcaggaactcaatgcccggatgatactatataacttctgcgaatttgtgacagctcaggccgttgtgagaacacgagataacacaaagcatatctacaaaataaatttcgccaccgcagtcaacatatgcagagcatatttaaaacatagcagtgacgaaattgagaccatgcttctcatacaaaagcacctgacaccagtcaggagcaaccgtaaatatcctatccgcctccgtccaaagagaaatagggatttcatgtatcgagcggcttaaatatcatcactattatacttctttttcagacagatatgcaatctgtctttttggtatacgaaattgtattttatgttcttcacaggtagtcatctgggggggcagacaggacttcccattgaacataatatttcttaactgaaccatgttttctaaagtcaaataacgtgatatactgtttttatcagacgaaatgcttatctaaatgacattgataaaaatatatgtatgataaatttatacatatctttttcagtttccttttattccgcagcagattctgcttaattgccccttctgacatcttatgtctggcggcaatatttttaatggattccattacccaatatctctggacaaaatatccctgtccctgtcagataaaccgcccaggaaacgattgatgatttctatcagttcctcagcttccatatgttcatctaaaatatgcgttctagcggtatttaaactttctacctcttccgttatgtttgcaatatgcatatccatccgttttgccgcatgcttttttcttaacatatcaattgcgaatcctcttgtaatttttcctaagaaagctaccagttttggcggcctttggggtgggatataccgccatgccgcaaaccatgtatcatttacacactcctcggaatcttccctattcataagaatcttccacgcaatagaataacaagtggaattatactttttatcaactaattgtattgcattttcatctcttctccagaacaagtctataatataagtatcttccatacagctttctccgatttcgtactttcaaacatcctgtgcaaatatcataacaaaaaaggctctcataataaacatcgtatttcttatgctttggttacgctttctcttcaaatttctgtttcatgctcttatcttcatctacaattcgtagtattcccccaatggtgcagaaacttattttcgttctatattcaaaaatttctgccaaagtgagctgtttatatgttatcatgtaggtatatctcctttaggtggattggttaattagtttctagtcaattctattttaccataaaccttgaggagatattttattttaacgacaaaaaacaccgtatttatgcagtgtttggcgtttcgcaaacgcctatacgtattcactaaatgaaaggagacaaatatatgcaagcaaaatcaaaaaacctaattattgggtgcattgctacaatggccatcgttgcaactatttcaactgtgcatggacatgtctgtttggataaacccttcacttctcatgaacatacctgggaaattattgaaatcaaagagggaaaggaatatatttcttgtccgtgcggctgtatggaaacacgagatcacaatcacaagtgaaatatcgcacgcattgaagggaatactctattttttgttgtgactgtggatgcaatgagagttgtgaccttagtatgtttgaggaagtgtcagtttgacacttctcaggcttactgaagtggaaaccctcggtatgaggacagcctattttgctgtactacatagacggttccgtgatatagtgtttcagcctaaccccggtatccctgcagattgtcgcatgttttcagtttcctattatgtaatcaatccgtcttttttgtccgttctgttttttcttctgctgtctggcagctctctttctgtttttcaggttttgtgaagtcaactttacagaatttacttttctctttctcaaaccaatttaaacttttctaaacaaggggccgttgtctgtttctttttattttaccctgattcttcttccccaggatacccagtctccgtaagctttccttccgttaattttggcccatgggcggactctcagagtataggttccgggcttcacgcctgtaatccttgtataggttgtccgattgttccgtttatatacggtggttccgcctgtagatctcagttccatatctgctcttgcaaatccttttggtacgccaactgttacagacacagctcctttacttgtttttacagttttaatcttcaccctctctgtgggaattccgttctttactactacttttactggataactccatgccccaaaccttttcccggacacatttccatcataataatccctgttgtacgcatggattcccagataatacgtgccgttttttacatttgtgaaggtgatggtctttgcatcctgattcttcgccaccttcacataattctcaggtctgtcaacccagcttttctttgtcagaaccgcatcgaaaccttcgctgtttgcgcagtcataagccgctgccttaatagttgacccctgtactttcacatcttttatcgttgctccttccggataaggcggtgcaatatgaggacaattctgggaaattatataagataattctattcctcctgtgatggaaaccttaaaaatatcagtagctacctgttcttcctttttcggacgaagataaaccgttgtaccttctccgggcataataacccccgtttcataatcatcaaggtacgcccagaaatgttccgtattctcaaaatcaaccgtaacaggattttttccattgttatatatccatatactgcgttttggacacataaacatatccggatccggatctgtattatcccaccagtcgtattcttcaggggtaattgtgagaaatctcgtaccgctattcggtctgcagttcacctcataatcctgatcagatgcgccgcgaataagaacccgtatcctacacttcgcctgaatgccttcttctgtttccatgacaaaggtttcttcatgaattcccggagaaagatttttctttacataaatatccgctgcaacagcttctccgggcttaaccttattcccaacttccattggaaaccttccctgaaacggataatcaaacggctcaagtgtaaaatcattcaattctgagatagatttgatatgccaagcctctgtgcctgtattttttatctccagcctttcccacccccaaccactgccgtttactccagtctgtcccaaatcaaggatttcactagaaactgtcgcctcatatttctcatatctcatttcactgtctgaatccacagtatcctcgaaaatagctgaagcttccgatacatcgccttcctgctctgtggtttccgaaataaatgtttcctctccagcagaaaaatcggctgccaataccggctgaccggtaacgatcacagcagaaagaaacagcgataaaaatgttttgcctctccttctcataatactttgccttctttccatcattatacctcgttatcatgttacgtttatgttaacatattgtatcatatatgtaatattttttcaacaatcttttttatttaacatatttaactatgcagaaaaagcggcttgaaaagccgcttttttctacctttgcaggaacccaatctctgtaaagataagtttcgttatttaaattcaatggaagaaaatctgtagatgtagatttcttttgcattgtgcgttttattccaagcttcaataagcagttttcgtgtttcatcatgcaacataataatcacctcttgactctatcatagacctgttgtcaagaatgtgcagtattttttgggagtgctataagaaacatcctgaatttacagaccgttaccgtcgcatcaaagcacgccgtggtcacaagaaagccgtcattgctgccgtatgatcctgaccgctatctggcacatactcacagatttaaagccatatacaccggaaggttttcttgactcccgtcctgtgaataaagaaaaagtgttaactacttcacaggcacttaatctgcttaagcaaagaggttattttatcaaagacgatcctttgtcagtttcctgattaggtgttgcgtttatattcaatttttcagccacctaaagatggcttatttgtgatgtcaaaatttattctctatccactatccctttgtttcaaactttcagtttcctattatgtaatcagtccgtcttttttgtccgttctgtttttttcttctgctgtctggtagctctctttctgtttttcaggttttgtaaagtcaactttacagaatttacttttctctttctcaaaccaatttaaacttttctaaacaaggggcagttgcctgtttctttttattttaccctgattcttcttccccaggatacccagtctccgtaagctttccttccgttagttttggcccatgggcggactctcagagtataggttccgggcttcacgcctgtaatccttgtataggttgtccgattgttccgtttatatacggtggttccgcctgtagatctcagttccatatctgctcttgcaaatccttttggtacgccaactgttacagccacagctcctttacttgtttttacagttttaatcttcaccctctctgtgggaattccgttctttactactacttttactggataactccatgccccaaaccttttcccggacacatttccatcataataatccctgttgtacgcatggattcccagataatacgtgccgttttttacatttgtgaaggtgatggtctttgcatcctgattcttcgccaccttcacataattctcaggtctgtcaacccagcttttctttgtcagaaccgcatcgaaaccttcgctgtttgcgcagtcataagccactgccttaatagttgacccctgtactttcacatcttttatcgttgctccttccggataaggcggtgcaatatgaggacaattctgggaaattatataagataattctattcctcctgtgatggaaaccttaaaaatatcagtagctacctgttcttctgctttcggaaaaacctgaattatcgtattttcccccggcataacaactcccgtgtcttcgtcaatatagaaccatgccctgaaatgttccgtatcctcaaaatcaactgtgacaggtttttgcccattgttgcatattgtaatcaaccgtgatgggcacatcaacatatccggctctggttctacatcatcccatgaatcgtactcttcctgagtaattgtgagaaatctcgtaccactatttggtacacagttaacctcgtaatcctcctctgattccccacgaacgagaacccgtatcctgcactctgcctgaattccttcttctgtttccatgacaaaagtttcttcatgaatcccctgagaaagatttggctttacataaatatccactgcaacagcttctccgggcttaaccttattcccaactttcatcggaagtcttccctcatataataatggatgctctaaatgttcaagtctaaaatcattcaattctgaaatggatttgatctgccagctctctgtacctgtattttttatctctagcctttcccaaccgccgccgtttactccagcctgtcccaaatcaaggatttcactagaaactgtcgcctcatatttctcatatctcatttcactgtctgaatccacagtatcctcgaaaatagctgaagcttccgatacatcgccttcctgctctgtggtttccgaaataaatgtttcctctccagcagaaaaatcggctgccaataccggctgaccggtaacgatcacagcagaaagaaacagcgataaaaatgttttgcctctccttctcataatactttgccttctttccatcattatacctcgttatcatgttacgtttatgttaacaattgtatcatatatgtaatattttttcaacaatctttttttatttaacatatttaactatgcagaaaaagcggcttgaaaagccgcttttttctacctttgcaggaacccaatctctgtgaagataagtttcgttatttaaattcaatggaagaaaatctgtagatgtagtcttcccccggatgtttaccattatcgcccgcaatcggactgttcgcattaaccgacacaatcatattgtttgtatttctgtcaatcgctacggattccatttcaaaactaaagaactttgattcatccagttcattgttaaaggcaaaatccggaattaaaacaggatatttcttgccatctttaaatttcattgttttagttctgctcatatcaatgtgtagtaccctgcttccactggtttgcacatcaccattaggaaaatattccagttttttcgtcgtaacaataaataatccgtatttgtcactgtaattgattccctgaagcacttcataaccggtattcataaaatattttgtttgatcaaccacaacttttcctgctgagaagtgtacaatacacagtttatatatttttttatcttcttcaccctctgcaccggtttcggtaagaagaataaactgattgcctttgtaatggctgattgcgtttgtccggttttcccaggtatacctattatagggccattcttcagatgtactgcccatagtaagcttcacaaccgaatattcaccttttccattaggttccgcacaggtaacatacaattcatgattgtatatatccattccattggcatgatacagacatcttttctctcccggtactaccttattagccagtctttttacgcccttcgtactgcttgtgtaatcctcaaattcccaaatggctgctgcgcacttactcggttctttatattctccatttgtaccggcttttataccatacaacttttgagttctgtcatccccatcaaatgctaacgcgccaaaatttgtcgttttaatatttcctatttccttattgtctactttcattcccttggcaagagcgcagttaaaactataagtacctttttcataagtaattccattcaggacagaaaaacggtcctctgctttcccggttcctgtaattacatttgcagccagtacaagatgacctgctttcatacaaatagattccagattatactgcttataccctttcatctcaacattaataactccgtctggaatatatgaattcacattacttctgtaatccacatgtacaattctgtttcttccggcagacaattcatcatttgtcagaataaacagaccgtagtctaaatggtaataaatatcctggatacggcttgtatatccatatcctctgtttgtaaccttaaattcatgaactacttcataactattagaactctccaatctcagtttttttacaatcagagtatcgttatctgcatcgttggagcctcgtgcaagaatgaaaaattcatttgccgcacctgtatgtgcaattccaagcgctccatactgaaattcacttacaatatcaaactccttaataacattaccggcagtatccatttttacaatctttgtagtatttccatatcccgctgtatcttcagcaagcataaataattctgtgccgattttgctaagccctaatgcaaaatatcccaaaccggttttaactgccacagcctgtgcatctgcgtttgaataatccggtgttttatataaggttgttacctttccgcttgttttcacactgtacatagtgtctccgctgattgtaattcccgctacattcgtcgcagctcctgcatccacaatttttgctcctgctgtaggtgtcgctgaaataacaagtgtttttccattaaatgttcctggcatataaaatatcctccttctgttttttgcagacccttatagttttattggtctgtttcataagcgcttacataaaataaaaacccgttttctctattttcggaaactactttttatatttttttattgatttcttttgtatctgccataatgtactcttttacctctgtaatatccctctcgataacacttaatacattaaatttttctgttaatgctgacagtaattcctgatactgtttttcccgctcttcctgtcttgccgaaaatctttcatttgatttcacaatgtagatcaaaagaaatactgccaatactgcccatatcccttgagataatgcagcatccgctgggcgttttaacaaggtcgttgccgcactgcaccttcgttccgaacatcggccgcacgatccccgaacaacattcattacgatggcgaaaaaagcgggcgtagatgagtacgttgtgaaacgtcttgccggtcacaagatcacagacgtaaccgaggcggtctatacaatccgtgatattgagtgactcagagatgagatagaaaaaatgccgtaacccttgtggttgcggcatttcttttcctgtgatcggctcttctttttgtttccttcgctctgttgcctacttgttacctacctgtttgcctatgttgtcattttcaaggcttctcaccgtgtctcaaattactttctcattttttgatctaaactaagaaaagtaccgcagcccttggaactacggtactttctaggtttgttgactctttgattaaaaaggtttgattagaactttccagccttagcagcttcctcaatggaaacagctactgcaactgtcataccaaccatcgggttgttaccagcgccgatgagacccatcatctctacgtgagccggtacagaagaagaaccagcgaactgtgcatcagagtgcatacgtcctaatgtatctgtcataccgtaggaagctggacctgctgccatgttgtccgggtgaagtgtacgtcctgtaccaccaccggaagcaactgagaagtatttcttacctgcttcaagacgttctttcttgtatgtacctgcaaccggatgctggaaacgtgtcgggtttgtggagttacctgtgatagaaacgtcaacgtcttctttccacatgatagcaacaccttccggaacgctgttagcgccgtagcagttaacttttgcacgaagtccttcagagtatgcttttctgaatacttctttaacttcgttcttgtatggatcgtattctgtctctacatatgtaaagccgttgatacgggaaatgatctgagcagcatcttttccaagaccgttcaggataacacgtaatggtttctgacgaactttgttagctttctcagcgataccgatagcaccttcagctgctgcgaaggactcatgtccagccaggaagcagaagcactctgtttcttcttcaagaagcatcttgccaaggttaccatgtccaagacctactttacgtgtatcagcaacggatccaggaatacagaatgcctgaagaccttctccgatagctgctgctgcgtctgctgctttcttacatccttttttgattgcgattgcagcacctactgtatatgcccagcaagcgttctcgaaacagattggctgaatgcctttgatctgatcgtatacattaagacctgcgtcttttgtgattttctcagcttcttcgatagaagcaatgccatagctgtttaaaacagaattgatcttgtcaattcgtctctcatatgattcaaataaagccatttcctgttacctcctaaattattcttttcttgggtcgataattttaacagcgtctgcaacacggccgtactgaccttttgctttttcccatgcagtattcgggtcatcgccttttttgatgaaatcagtcatttttccaaggcttacgaactgatatccgatgatctcatcatctgcatcaagagcaatacctgttacataaccttctgccatttcaaggtaacgaggtccttttttcagagttccatacattgtaccaacctgagagcgaagtcctttaccaaggtcttcaagtccagcacctactggaagtccttcttctgagaatgcagactgtgtacgtccgtaaacgatctgaaggaaaagttctctcatagctgtgttaatcgcatcacaaactaagtcagtgttcagtgcctccataactgtaagtcccggaagaatctcggaagccatagctgcagagtgagtcatacctgaacatccgatagtctcaaccagtgcttcctggatgataccctctttaacatttaatgtaagcttgcaggcaccctgctgtggtgcacaccagccaacaccgtgtgtaagaccggaaatatctttgacttcttttgcctgtacccatttagcttcttctgggattggagcggcgccatgatgaacgccctgtgcaactgggcacatttcttctacttcgcgtgaataaatcattgtaaaactcctttcaagtatagattaacttcatgttgttatactctccactgtacagaactgctgaatgaactgcacaggataaaactccgatgtctgctgaatgacttcagaggagtatgcctaacaacctagtgttattttctcacaaaagtgctgattcgtccagtcataaattgtaaaatttttaaccatctttgatttttttgtggtaaaatagttctaatttctattaatgaagggatttctattatgacaacaaagttacctgcttcctttctccctgcaaaatttcaggttctgagcgggagcactttaaaattaattgctatcatcctgatgctgatcgaccataccggcttaatgatcctgtataattatcctgccacaactgcaacccttttcagtttcggcggcgtggattacagctggtatcggattttccgggatatcggcagggccgcttttccaattttctgttttctgttagtggaaggatttctgcatacacataaccgtaagaaatatggcctgaatctgtttctgtttgcatgtatctctgagattccatggaacttcatgtttaccaacacctggagatatgaaaaacagaatgtatttttcaccctgtttctgggatacctggcattctgtgccctggaatacttctgggataatcagaaaatgcagcttgtctgcgtgctggcactgctgactgtctctgtgtttctgaaggcagattacggatggcggggatttgtattcctgctgatcatgtactggttccgcaacgataaaaccgcccaggcgatcatcggaagctgttggctttactatgaatggaaagcctgctttgcttttctttccattaatatgtacaatggtgaacgtggatttgtaaaaggaaaatttctgaaatatgttttttactggttttatccggtgcacattaccattctggtaatcctgagaaaacttttatttcatatgtaatatcaggtacaacaaatatcttttatatcagacagacataaaaatataaaagggcaggctgtatgactgaaataatatccttcatacaacctgcctcttctatattttcaacttctcttttctgcaatttctgtttttgacttgtaaatgtgatttgcaggtacgcagcctcttactgaggaaagtggataaatgttgcagcagcgtccgatcacagttccgggatttaatacggaaccgcatcccacttctacgttatctccaagcattgcgccgaatttcttcagacctgtttcaatcttctcgtcaccgtcttttacaactaccagtttcttgtcagattttacattggaacagatggaacctgcgcccatatgggatttgtagccgagaactgcatcgcctacataattgtagtgcggaacctgtaccttgttgaaaagtaccgcattctttaattccgtagaattacctactactgcaccctcacctataattgcttttccgcgtataaatgcacagtggcgtacttctgcttctttacctatgatgaccggaccgttgatgcaggctgtaggtgctactttggcactcttggcgatccatacatcttctgacgggtggtcgtattcttcttcacttaaggtctgtcccagtttcagaatgaaatctccgatctccggtaatacttcccatggatatgtttttccttcaaataaatcctttgcgattgtttcgttcagatccagaaggtttgcaattgtaaaatcttttaacataatattttcctcttttctctcgctatgatgacatgttttcttttatctgtcacaaatacacactactttgaagcagacggctttctgcaggtacgtgatcgtcccgctgcggacgttgatctgcctgttgttttcgcactgtttttttcaaatgaatccttataattcactgctgcagcatcaaagaactgtctcagatatggctggatattgctgtcctccacctgtctggtgcgaaggcgcacaaaatgttccagcttatccatatattcctgttctgtaatactgccctctgccacataattcagtcctttttcccagcttgcagtcagttccgggttcagaagctgtctgatggagcagtttaccacatcaaagatcatctctccaagaagggttggagtgatcacctgggttttcttattgagtgccagatatttgatattgcacagtttcttaagaatttccgctctggtggcactggttccgattccgcagcttttaatctgggcacgaagctcttcgtcctcgatcagctgacctgcattctccattgcaagaatcatagaaccggaattataacgctttggcggcgatgtctcgccctctttgatactcaggctgtccacagagagtatatcaccttttttcaggttctgcaatgcggcaagaagtctggtatcacatgccatatcctcagccgaatcatcagctttgttcccgccgttttttcctgtatccggatcttcctcttcacttccctcattgccggctgcgccggctctgttcacactgctcatggcatctgctgcttttcgcttcgcaaaagaatttgtggcaacttttaagtacccttcatccagcagtactttaaatgaagaaaagaagctttcattctgaatttttgtcacaagactgatcttctgatatactgcaggaggataaaaaatacatacaaaccttctgacaatggtctcatatacacgctgcgcagtaagagaaacacttctcaatgcgtttaagccctggcctgtgggtacgattgcataatggtctgtgatctgcttatcattaacatatctggtctttgccagatttttgtaatttccctgttcaataatgtgctgtgcgatctctgctgtatgttcataattacgcagcccggagatattcttataaatctcctttgctgccgcagtagacaacacacgggcatctgttctgggataagtgaccagtttcttttcatacagttcctgtacgatttttaatgtctcatccgggctgatcttgaacagcttggagcacacattctgaagctccgccaggttaaataaaagcggcggattcctgttctcttttttccgctcgattttctctactgtacattgcagtggctgactcacagacagctcctgtatcagtttttcagcataggctttctctttaaatccgttctctttatacagataaggagtctggaaatatctgctgccttccacagctctccactctccctcaaagttttctccctcaagggcaatgctgctgagtacgcggtaaaacggagttttcacaaatgcacggatctcgcgctctcttcgcactaccattccaagtacacaggtcataacccgtcctacagaaatggcctgatatttcgtatttaaataatttgacacgctgtttccataacgcagtgtcagtacacgggaaaaattaattcccatgagatagtcttctttcgcccgaagataggctgaagcagaaagattgtcatatgctgacaaatcttttgcctctctgattcctctcataatttcttcttctgtctgagagtcgatccagaccctcttttctttttttccatgaacacctgccatctgtgccaccaaacggtaaatgtattccccctcacgtccggagtcggtacacacgtaaatggtgtccacatcctcacggttaagcagtcctttgacaatctcaaactgcttctgcactccggggatcacttcatatttaaattcgcgcggcaaaaaaggcagggtatctaaactccaccttttatatttgatatcatatttttccgggtagctcatggtgaccaggtgtcccacacaccaggtcaccacgctgtcctgagattccaggtagccatcccgtctttgtccgttgattttcaaagcttttgcgaattcctgtgccacactgggcttttcggctatgtataaagcttttgacatattatttatctgcactcatctttctgagcggccatgccagcaacagggcaccgcccaccatatttcctaaagttactactaccatgctctttaacatggctccaagggataatccaggtaccaggcagtatgcggtaacaaagattcccatgtttgcgatgcagtgctcaaatccacttacaacaaatcctgagatacacataacgatcatcaggaatcttcctgcatcactctttaatttcataccacagagcacaccgagacagacgaagaagttacagagcactgctctgaaaaacatctgtccgagcggaatactcaatttgtttccgataaatcctgcaaaataatctgctgttccggacgctcctgcacctacaaacaacaatgctaaaattgcacatccgacaaagtttccaaggtagcttacgccccataccttacctgcctctttccagctcacctgtttatcataggctccgaacgccattaccatattgtttcctgtaaaaagttcgccgcctacgaagctgatcagaagcactgcaatggagaatactaatgcccccacaaattttccccattcaggcatggtcttggagaatacgtttccaactacattactgtagatcatggccacatcaataaaaaatcccgccatgaccgcacgtataaagtacttgaaaaaattggtattcaccaggttactcttggctttcgccgcgtttgacactttctgtacatcttcgtaattcataactacacctccgcaatgtattttattgagaacattatatcacctgaatatctgtttcacaaccgaaatcgtcaaacaattcaagaatattcatcagatttgtagttactgttcacacaccactatcccgcgaggtgttttggcatgaatatgccaaaatcccaagacatacaagccaaaattccattgccgcaggcaatctggaatgaattttggctacgttactgtgaacagagtgaacagtaacgatttgtaattatgttccattatattcgaagatttttatagcaattccataaactaatgcattcaaggcagttcggcagagcgcaaaagacaagaaagatctccgcaagcgtacagagcatgtctgaaattaaagctgatttttttattcgaatacaactgctttatcctgcaattctgttacatatccgataacaccgccgaagatatccatacctgcaagctcctctgcaagggcatcggcctcttcttccggtactgcaagcagaagtccgccggatgtctgcggatcaaataccagatcctccatccagagttccttaatctcacttcgtacttcatcgcctgcgaagtcacgatttctgtatgccccttcaggaatcagccccatctgtgcatattcttcaacaccctcaatgatcggaagtttctcagactggatcaccagagttttccggctgccttttgccatttccagactgtgacctgcaagactgaatcctgttacgtcggtacagctgtggatcgtgtatttagatgcaatctctgctgcatatttgttcagcttcgccatgatcttctggactctctcaatttctttctgagacgccatttctgccttaatggcagtgttaagaattccacagcccagcggtttggtaagaataaggatgtctcctgcttctgcgccgtaatttttccacattttgtccggatgcacataaccagttacacagagtccgtatttcggttctttatcattgatagtatgcccgcctgcaaggactgctccggcttccatgaccttatctgcaccgccgcgcagaatctgctccagtacttccggaccaaggcagtttggaaatgctaccacatttaatgccagtttcggaacaccgcccattgcatagacatcactcagtgcattggctgccgcgatctgcccgtacatatacggatcatccactactggcggaaaaaagtctactgtatggatcattgccagttcatcattaatcttgtatactgctgcatcgtctgatgtctccggacctaccagaagcatcggatctgtaaatttcggaagtttgcctactacctgcgccagaactttcgggccaatcttagcaccgcatccggctgcactggcaagctgtgtaagacgcacttcgctttttttcatttcatttcccataagtcagttcaccccaattgatctccatattcagaatctcctcgtaactgttcaatactttcgttactgtaaacggagtgaacagtaacgtactttcacagccgacagactgccgaatagttacatatcttctataacaagagattcagtgctatcattgtatcatgttttcacatatccgtcaaaatgtgaaccgtttaccatatatcaggtattcctataaatctttccattttatgcaagaatcctataaatcttttcatattccagatcctgttccttcatataggaagctgtttcttcttcgttctgttccccgcatttccacgcaaggccgcaggaagctgatatttctcttggcacaggaatcagtctgcctgtaaatttgtttttcttacattccctttccatggcaattgcctgagtggtagtttcaaaagtcaccactgttgtcagaactttttctttcataatccgtcgtgtcctcataaaaagaggcaccgttaccggcacctcttttattattttctataaattatttcgcctggatatatccttttgcttttaaggtttcagcacagagaactgctccgcctgctgcacctctgactgtattgtgggaaagtcctacgaatttccagtcatatacggtgtcttcacgaagacgtcctacagatacgcccatgccatgttcgaagtttacatcctctgtaacctgtggacggttgtcctcttccagatactggatgaactgcttcggagcacttggaagttctaattcctgtggaagtcccttgaactctactaatgctttgataagctgctctttagtagggttcttacggaatttaacgaatacagctgctgtatgtccgttcagtaccggtacacggatacactggcatgtgataaccggttctgtagcaggtttgatcacaccgtcttctactttaccccagattcttaatggctctttctcgctcttctcttcctcgccgccgatgtatgggatgatgtttccaaccatttccggccagtccttaaatgtcttacctgctccggagattgcctgatatgtagtagcaactacttcatatggctcgaactctttccatgcagttaatacaggagcataactctggatagagcagtttggtttaacagcgataaatccgcgtgttgttccaagacgtttcttctgggattcgattacatcgaagtgttccggattgatttccggcactaccatcggtacatccggtgtccatctgtgagcactgttgttggaaacaaccggtgtctctgtcttagcatattcttcctcgatcttcttgatctcttcttttgacatatctacagcagagaatacgaaatcaactgttgcagcaaccttctctacttcgttcacgttcataacaacaagattcttgacaccctccggcattggagtatccattttccatcttccgccaactgcctcttcgtatgtctttcctgcacttctcggacttgcagctacagttacaacttcaaaccatggatgattctcaagcagagagataaatctctgacctaccatacctgtagcacctaaaataccgactctaagcttttcactcataatatctttctcctctttatcttctgcccgcgtctctaccctttcgcggacatttttatccaggtgtccttatattgcgtacatctgtctttcttgtacatactataacaaaccaaaataaattgcaagcatttttttaattttcttccagatattttttgttctcagcgatcactttctccatcacgtcaggtcccggcgcaccgatggtcatacgtttttctacacaggttttcatactgatcgcttcgtaaatatcattctcgaataccgggctgatggctttatattcttcaagaggaagttcatccagagaaatccctttatcaatacaggtaagcaccagacggcctacaatgccgtgtgcatcgcggaaaggtactccatgatttaccagataatcggctgcatctgtagcgtttgtaaagccattctttgcacttgcttccatattctgtttgttgaactgcatagtggagatcatgcctgtgaagagggcaagacatccttttacagtgtcaatggcatcaaatgtaagttctttgtcttcctgcatatctttgttgtatgcaagagggattcctttcatggttgtaaggatagatgttaatgctccgtatacacgtcctgtttttcctcttacaagttctgcgatatccgggttctttttctgaggcatgatactgctgcctgtgctgtaggcgtcgtcaatctctacaaagcggtattcattggagttccacatgatgatctcttcgcagaaacggctcatatgcatcataattgtggagaatgcggacagaagctcaatcacatagtctctgtctgatacagagtccatgctgtttctggtcgggccgtcgaaaccgagaagctgtgctgtatattctctgtcaagcgggtaggtggttcctgccagtgcgcctgcacccagaggacaggtgttcattctcttacggatatctgcaagtctgcttctgtcacgtacaaacatttcaaagtatgcacctacgtggtgagccagtgtgaccggctgcgctttctggaggtgtgtgaagcctggcatgtatgtgtggacattctcttccatgatcttctgaagtgcttcgagaagtttctttaccagttcgtctgtctcgtcaatctcatctcttacatagagtttcatgtcaagggctacctgatcgttacggcttcttcctgtgtgaagtttcttgcctgcatcaccgattctgtcgataaggtttgcttctacaaagctgtggatatcttcgtattcggatgtgatctcgagtttgccggattttacatctgcaaggattccgtcaagacctgcttcgatctgatctttttcttctgctgtcaggattccctgtctggcgagcattgctacgtgtgctttgctgcctctgatgtcctgctcatagaatttctggtcaaaagagatggatgcattgaagttatatacaagtttgtctgtttcttttgtgaaacgtccgccccaaagctgtgccattgtgttattcctcgtttcttctttatttttggtattattgcttttacgtgttagtgtaacatattttttcagtattgcaaagtagttagtttggaatcattcaaaaggtacgtgaagaaaaagaaggtgtgttggggcttagtttcggaaccctgtaattctaaggcattcgggaatctgctaaaaccatgagccgccttctcaaactcgctccattgcaaacttcgctcagacacgtgagacggtcggctcataacgcagattcccgaataccaagaattacaagaaccctcaaatgcgccccaacacaccttctttttcttcactgggtattggctatatgttacataattgtggttactgctttattttctgttttcagcctctcttcgggaatagacgcaaccgcagtagttctgacggtagaggtcgtattcgtgggatagttcgatggaacgtttgtagccgttttttttcttgaagtcggatgggaggtgttggacgtggtagatttctgccagttcttcaccgatttcgttgatcttggctgcgtttttcagagggctgatggaaagggtggtggtaaaatagtcatagccgccctcttctgccagttttgctgcttcttccatgcggaggcggtagcatttgaagcagcgttcgccaccttcgggtacgtcttcgaggccttttgccatctggaagaattcctgtgggtcgtagtgaccctctatcagtttgacagggtgttcaaattccatggagtttacaagacgggtaatttcatggactcgtttgcgatattcttcttccgggtagatgtttgggttgtagtagaatactgtgatgttgaaatattttgacaggtattccagtacgtaactgctgcagggtgcacagcagctgtggagaaacaggcttgggatcttgttatctttttgcgcctgatctataagtttttccagttctttctgatagtttcgtttattcaacagtattattatatcctttctgcatcttcacaaatgctttttattatcttttaataaaatgcgaatacctgttcagatattctctattgtgccttcgtaatgattctttgtattttttaacttcctgcactctcctattcgttcgcccatttttacgatagtctcatatccctcttctgtattctcgatcagatcataatcaatacggacttttcccggctggatgaggaggattattgtggaacctccgaattcgaagttgcctttttcctggcctttctttactgtggcaggatttttatggagatttgtgatttttcctaccatcatggcgcctacttccatcatgaggatggttccgaattgttttgttttcagcagagtgtattctctggcattttctttgtagatgggatatacatcgtttgctgcaggattcactgtgtggaaaacgcctggcagagttacattcgcggattttcttccatctgccacatagcagtaatgatgatagtcatctactgtcagtctgaaaatcagcgcatagccgcctgtgtatctctcagcaattgccttattcttcagaagctgtcctgctgtatattctgtatctttgatgctgaaacgtgagtctgagctgatcctgtgtacggaaagttttccgtcacaggggctgatcaggatgttttcgcgcatatcgatcgggcgttcttcttttcggatgcgccttataaagaagtcattccatgaagagaagttctgtttttcgtaaatgctcaggtcaatcttgttgttttttacaaaatccggtacaaatctggcagaaagtctggtgttaagcaggactcccgctgcctttgacacgaaaggtctgatcaggagtttcaggcagagtctgccaccccggtcattatatagatgccgcaggaatttatcctgctcattctcttcaatcgtgatatttccttttctgtcaatatacttcataaataaatcctttcctttgtcataggcagaaacccacttcctttagggacgccactgaaaaagtggtcgtaaaatcatatatctgatataattaaggtatcataattgtcggaggttgaaatgttatcatcccaacttaaacttagccttagttattattcagatttatatgacatgattgttccaaaagatcatattctaagaaaaatcagggaattggtcgatttttcttttatatatgatgaattaaaaaataaatattgccttgataatggacgtaatgcaaaaaaccctatattgctatttaaatatctgcttttaaaatatctttataacctttctgataatggtgttgttgaaagatcacgatatgatatgtcttttaaatattttctggaattaacgccagaagaagaggttatccatcctagtcttttaaccaaattcagaaagcagcgtttaaaagatgaaaatatacttgatctgctcataaataaaagtgtagaacttgccataaatcaaggtgttttaaaaagcaatactataattgttgactcaactcatacagaagcccgttatcataaaactactcagagagaaatgttgaaaaaagcctctacttctttaaaagtagctttaaaagattctgataaagacatttatctgccagatgaacctgaaaaacgagcttctttagatgagtataatgaatactgtcatgaattattaaacacagttcaggaaagtccgtattcagaactgccaacgattaaagaagaatcttctatgttatccgaaattttggataatcagattgattgttatgatcaatccattgacccggatgcccggattggccataaagcggtcaattcttctttttacggatacaaaactcatttggccatgacagatgaacggattatcacagcagcaacaatcacatccggcgaagcatttgatggtcaggaacttccagtactggttcaaaaaagtaaagcagcaggtgcaaccgttaatgaagtaatagcagataccgcatattccacactggaaaatttaaaagatgcacaaagcaatgactataaattaatttcaaagcttaacccgagcatcataaaagggactcgttcagaggacggctttatctttaataaagatgcggataccatgcagtgcccagcggggtatttggctataaaatatcgaattgacaaacgtagtaatcagaaaaagaatacacgtatcaaatattttttcgatattaataaatgccatgtctgtccttatcgtaatggctgctataaagaaaatgcaaaaaccaaaacgtatagtatcactattaaatcggattatcataaaaatcaagaagcgtttcaaaaaacacaatatttcaaggaacgtttcaaaacccgctatatgatagaggcaaaaaatagtgaattaaaaaatatacacggatatagtcgttgtgatgctgctggactatcaaacatgcaacttcaaggagcagtatcaatatttgcagtcaatttaagacgaattttaaaactaaagggagaagtctgcccaaatgaggaaaaataggaaaattcatctctcaaaagggtagattttgcatccctcaaaacactattttagcaatattttattatcaaggaacatttttgcacatatttgacaccctgtgatactaaacttaccactttttcagtggcgtccctttaggcggtgggaggagccttgtaaattgttacccaatatgctacaataaccgtagcagtttttaaagagaaaaccgttagatgtgctgctcatcaaagacactcttttgtgcattgacaagatatgaggttgcaatacaaaactcgcgtattgcgtaaaatcttacccgtaaaagaatgtttgctgtatagcatgggaagtttagtacctgatacagttacagatgagtatatcttgtctgtaaagggtgctgtcaaccaccctatgatgtagcgccactttaggtagcaatacctattggggataaaaggtcggaggcgtaagccgttactacgactgggcagttacaagcccattacctttaggtgatggggagttgactcgtatcttccctccataaaaaagtttgtgttactgttcactccgttctcagcagcaaaagtataaccgcagcctccccgtttcccgggaaccgctgcggccagtcaacagttatatttattttatatcaaacggaacatcttcgcaagtgcaagtgccacgactgcaaccagcaggatacgtaccggattctgaggtttttttaccttgatatccagaataaaaagcagtcccacgataatcactgcaatatgtatcacgatcaggaaatagagtccgcaatatcttctcatcagataaaggaacggcaggatgatcgccatggatgtgatcggaagcccctgataatactgtctgttctcagaagtctcattctgtctctttgcttctgaaacattaaaatatgcaaggcggatgacagatgccacactgtaaaaaataagcgccccaatccccgccggtgtattcacacccagacagtaacagatcattgccggaaaaataccaaagcagaccacatcacataaggaatcgatctgaatcccgaaattcttctcatcatccgtacggttcttcttcgttctggctatctttccgtcaaacatatcacacagtccggaaagtgccagacagaaaatcgcaaccttaaaatccccctccagagccctggtaattccaaatacggaaattcccaggcttatataagtcaatattaccgtataatcataaattcctaaaaacatattttctccccctacttttcttcttgttcttttcttcctattatgaaatacgccacacaggtcatcactgcactgataagcatctgtgcataataggaaattcctctgctgagcagcattgcaggaagtaatgcttctccgaaaaccggtgcaaacatcaccagataaagagactcactgattcccattcctccgggtaaaggcagcatatcaacagagacagatatgacagactgcaaaatcgtaagggttataatggaatatccatgaaatcccagcgaacggtatacccagtatgtaactgtaaataacaaaatcctctgcaccatagtgatcagtaacactttcaggatcaccagcttgtgacttgcccagaaagccgcagtttcatgatactggtccatagacgcttccagtttctcaagccgggttgtctttggcttaaggaaacggaaatgttcaataagtttcagaccttttaccatgatccatttcgccagtccaggtgcaaatacaaggatcatcatgaaagtaacgcagaaaatattcagacctacacccaggtaaaacacccacatgtactggccaagatatccttccagaaagcctctgccaaaaatccagattacaattccgatcactaccagaaccgctttataagtaattgtgacaatcatcaggaccagcgtagtgacaggaatcggaagtttgtcctttttcataaaataaatctgcattggctgtccgccggatgcagacggtgtgatacagctgaaaaagaatcccacaaaagaatacagagcacaatgccccatctttacttttgctccgagagtccgcatcatatagaaaataattacagactcgccaagtatgaacagtaccacacaaaccacactgaccagtaagtaaaccggatctgcctgccgtactgtatgaataatctctcccagatcctctcccttaaataccatatatacggtaatggaaaatataaggatcagaaaaatggtgttaaatattgctttctttttgtttctcatttgcttacactttcttatacatttttttacagcattcgtctgatttctatacccaattcatgtatgtcacagtgtctgatatatgtatatttctgatatgaaacacatagtaaacagtaacgtattccttacagaacatttgccctcaaatactatagcagcaaaaatactacagtctatctattatatcataccctgacatttctgcatatcataaattatgaaaatattcgttactattcaccgaatatggaggtatctgtatgaaaccactgctggatattacagatgtcagtctctcctaccacagtttatcaggggaaacccctgccctttctcatatatcctttcaactgatgccaggtgaatttctcgccatcgtcgggccgtcaggctgtggaaagtccacgctgctgaatctgatctgtggtctgctccggccagaacagggacagattcttctggacggcacgccggtaacttccggtgactgccgtatcggatatatgctgcaaaaggatcatctgctggagtggcggacaatttataaaaatgttcttctcggactggaaatccgcagggaactcactgccgaaaaacttgcttatgtaaatcagcttctctcagattacggtttggacaaattccgctctgcacatccgtccgaattgtccggaggaatgcgccagagagctgcactgatccgtactctggcattaaaaccggaacttcttctgctggatgagccgttctctgcactcgactctcaaaccagactcagcgtaagtgatgatatcggcaaaatcctgcgtcaggaaaaaaagactgcaattcttgtcacccatgatatttcagaagcgatcagcatggcagaccgggttatcattctttctccaaggcctgccatcattcgtaagattgtgccagtttgttttgatctggagaaccgtactcctatggcttccagaaatgcgcctgaatttaaatcttatttcaatcttatctggaaggagctgaatcatgatgtctgaaatctcatatcatcagcaacagtatatccgacatcagaaaagagaaacgaaacttgttctttttttgcggatatttattcttcttttctttctggtgttgtgggaaatctccgccaggaccggactgatcgattcttttatcttcagcagtccggtaatgatctggcacagcttctgcagtatgtgcagagacggctctatttttccccatctctctgttacaattacggaaacactggtcagttttctgttcgttgttgttctgggtgcagggatggcagttctgctgtggacctgtcccagacttgcgaagatcacagagccttatctcgtagtattgaacagccttccgaaatctgctctggcacctttgcttattgtatggcttggtgccaacgaacggacgattattgtctgcggtatgtcggttgctatctttggttcgattttgaatctgtatacaggttttggcgaagctgacccggaaaaactgaagctgattgagacgctgggcggtgggaagaaagaaaagcttatgaagattattcttccgtcttctgtgccgttactgctcagtgttatgaaagttaatattggtctgtgtctggttggtgttatcataggcgaatttatcggtgccagaaaagggcttggctacctgatcatctattccagccagacctttaagcttacctgggtactgatgtccattatcattctgtgcatcatcgctattatcctgtacggactcctcggactgattgaaaaacgcgcccgcagatagttgttaatttttaaccgctattttttataacgaaacggtttcggaaacagattcaatatctgaaaaaattttgctgcaaaaagaagcccggaagatcatcgagttccacttaactggacactcctgaacttccggggcttctcttatctctgactgtctgtcagttattctgtttttaaaccagcgcctctgtccggttactatcatgttccgaccaaagcgcctgataatgtgtatattatgaattattcttctccaaggctctccactgcctctgtgaaatcctgtatcagatcttttatatcttcgatacccacactgatacggattgtgtcgtcgtacactccagcctcttccattgcctccggcgtactgtggatataaattgtagacgccggatgaattaccagagttctcacatcaccgatattggttgcaatctttacatatttcagatgattgatcagcttatacgcccgttctttggaacctgcacggatagtcagaatcgctccaccctttccactaagctgtttttctgccagttcatgatatggactggactccagcagtggataattgacagatacaccttccagcttctccagtgcctgtgcaagccggaacgcattgttacagacccgctccatacgaagccccagtgtctccatcccgataatattcagataagcgttcatcggagccagacagccgcccatatttcgccagattccgttcctcagtttcacaagataagcaaactttccgtatttcttatattccttcattccaggataacgttccggactccaggaaaagtttccgctgtcaatgataattccactgatggcatctccacttccatttatatatttagaagtagaatgcaccactacatccgcaccatactgaatcggattaagcagatacggagtcgaagttgtgctgtctacaatcagcggtactccttttccatgaagaaaatctgctgtttcccggacatccattacattcagtgcgggatttcctactatttcgccaaacactgctctggtcttatctgtaagaaacggctcgatcagcgccttctctaccctcggtataaaatgtactttgattccgaatgcctccagatcatgaagcagatccagtgtacctccgaacaatgcacttcctgcgattacctcatcccctgcctgcaggatattaagtaatgataatgtaaccgctgacattccggaggaacaggctacacctccaatcccgccttctaattcatttactcttcgctcaaacgcatctactgtcggattcgcaatcctggtatatgcaaatcccggtgcccgattctggaatactttttccaactgttctgaagattcatatgcaaaagcatttgccaggctgacaggcggcactgttgaaccattcgcataattgtctactgcttttccgtgtaataatttagtctgaaattccatgagcatattccccttgtaaaatataataatctccggactaacggtatgttttctgtgatatatcgtttccctgtttttagcaatttcatagtgtttcgatatgaataatagtatatatttttcacataaatctgtcaataaattttcttatatcaattatttatatatacatatagtttttgtctatattttgttatttttctatagaaataatttagtctaaaatcaacatctttttccatattgtcgaaaaaacatagctttttctatctttatctggtaaaattgatatatagcaatcctctaaaataatgcatcttaatatagagcgtatttgaaaaatcatttacaaggactgctatagattattatttcagtcaaacgacatatctgaaaatgaatgtcctgaaatgtaattccactacataagattcataacagaacggaaggaggccctttatgaaaacaaggaaaaaatggttaagaaaaacaaccgctatctgtactgcagcacttcttggtactgctgcaattccatctacagcatttgcagcagacagttacgcttccattgaaaaagatgcatgggcaaaaaaggtcacagaaatggcatcttcttacgctacatctatagaagaaagccagtctctgatgtcaggaatgcagagtgacatgattctgaaatttgaagattccggacgctcactgctggggtttgtcgcaccatttgatgtctcctggctggacaatgtcacactttccaatgatatctcttttacagaaggaaaagaaggtattctgatgaaggtccttcttaatgataataaaatctgtactctggaatattatcttgatccggacagccaggatatttatatgcgcatccctgaactctctgataaatatttcaagaccaatctggaagaagccgcagaccaacaggctgccaatattgaaaatgatcttgaagaattaacccctgatgattcagatgcagatattccgacagacaatttcgcttccgcttattctgacagtctcagcctgactgtttccatgatgtctgatctgtcagcaacagctccagaagcttctgtagtagaaacacttctggataaatacggatctatgctttttgacaatgtaacagaaggcgaaagcagtcaggaaactctgacagcaggtgatatcagtcaggactgtacagtatatgaaggccagatttcagccgaagacgctgtaaaaactgcaactgcaatcctggaagaagcaaaatcagacagtgatattgagaacatcctcgatacctggacagagaacctctcaagtaacgaggacctgcatgaaagctttaccaaagctgtagaagacggtcttgattttctgaaagatgcagataccggtgattccgatgattctcatctcaacaccagaatctgggttgatgagaccggcagaattgcaggacgtaaaattgagtttcaggaaggtgataaaataactcctgttctgaactggcagatgaccaggaacggctcagactttggctatcttctctccattgaaacagatgattccggcacactctccctgtccggatccggtcagattgatggcggtaaattaaacggaacctataaaatttctcaggatgatacagccgcagctgttatcgaagtaaaggactacgacaccgaatctgcaaaagaaggttacttaaacggtaactatactatcaccttccctgctgattcttcagaagatacagattcttctctttccatgctcgagaactttgcacttgtattagatttaaattcagcaaaagattctggttctgttgcactgtccgttgaaagtgcaggaagcactctcggaagcttcactgttacttccggtgcaggcgaatctgttgaaattccggaccttacggctctgggagatgtttatgacgtaaccaatgaagatgatatgagtgcctacgcagctacactcgacctcactacacttatggataatctgtccaatgcaggtgttccggacgaagtcatcacttatgttctcagcggcggaagcaattccgatgccgaagatgttactgatgaaaatgcctcagaagcagagtctgatgctgagtctgctgaagcaggcgcagcctgacttagcagctttatcactatcgtctactgcagcagacggttccagtaatactttatcccgatacctactactactgctgttataaattcacagatccagaacgcattccacacagcatctgccccggcaaaatagcacagcagataagctgccggaatgatcactataatatatcttaataacgaaatcaccagggactgagcacctttgctcagtccttctaatgcaccggaagctgtaacagagatggcagatgggataaacccgatactgatagtctgtaatgctgcagtgccaagtcttacagtttccgggttctcagtaaacattcccatcaatgtctctgatgctgtaaagcagatgattgttcctgccagcatgatcataccattcagaagcacagaaatcccaaaaagtttctttaccctctttatttctcctgctccgtaattatatcctatcaacgggcgcattccctggacaatgccgcttgcaggcagatataaaaaagtctgaagcttataatagattcccagaaccactacatagcttccggaaaaagccgataatatctgattcaggaacgagatcagaactgacggcagggcaatattcaggattgcgggaatccctaccatatacagcttcccgtccaggttcctgttaagttccagatatttcctgcagatctccaccggaatactacacttcttatatgcgatcagatatacaataactgtaaatacctggccaagaccagttgccagcgcagcacctctgatccccatttccggaaaaatccccactccgaaaatcagcagcggatccaggataatattggaaatacaaccgatcatcaggctgatcattgtcagcttcattctgcccacagcctgaaaaatcttttcgaaggacaggctgatcatgatcactgtggaaaatgcaaatgcaatggttgaatactgcacaccagatgagatcacttcctgctcttttgtaaacatactgagaaatacaggcataaacggaatacagattactgtaaaaataattccatggataatattaaagagcataccatgggtagctgctatattcgcatttttaatattttttgctcccagctgaaaagaaatctgtgcattgattcccacaccgaaaccaatggcaactgcattaataaagttctgtacaggaaataccagagacagagctgtcatcgcctgctcactgatctttgccacaaaaaagctgtctacgatgttgtacagtgaattcaccagcatagacagtaccataggcattgccatagatgccagaagcggcagaatcggttttttcttcataaaagtattgttcattcttttttcctttctctgtttcattgcaacaaaaaacgccacacaattatctctacattgctgtatgataatcgtgcggcgaaaagagttcatgtttgtcacaagactgaaaaatccacaccagttttggtgtgattaacatatcataatttatttcctgctgtcaagactttttatccattttactgcgttttcctgattcggtgctgaatacggcactgcaatgcatacaggatcgtagattacacctaattcctgttcaagctcactgtcagtaatggaaatgtgcgtagtatctgtctgcattccaaacttctcaaaagcttcctcacccatcaattccttcaaatctgcaaatggctcattcttcttcaaagtctgataaagcttctccggcataaccataatatcaatggaacctgcctggatctgtgccacataagccatctgtgcattataatcaaattctgccatttcagagtccgtagtaagattcacgcctatctctactttactatagggatcatctttgtacccaagtgtttctttgattttctgctcaggagtttccgtatcatttgccattgaatttaccactgtcatggacagaactgtttttattttggactgttcatagtaatcctttattccgaatataagagcaatcactgcgatcactccgaaaatagccggtttataatacatccagatatattccagctttttctttggccccattccctttaatttttctttctcaatcagacgtctttccttctttgacaaatccgattcattcttaatctccggattcagcacgctttcatcgtgctcttctgcctgttctgctctgttcttactctggttcttgtcctgatttttatctgccattctctctcctttgtattttctgcataatgattttcggtaactgttcagcaatccgccattctgcgaaacaccggacggttacgttcataagatttactgattactatatcacattttccattatgtgaacagttataattcccgcggttcctgaagataacgttactatgttactgttcattccattctcagtaacgcagccaaaattcattccggattttcatatcctgactatacatgattattctgcaaaatattttgccttgcatacgcagagaccgcagatatgccggaaactgtcaccactgtcagcatatataccaaaaccggacgcagccaaaaataaatctgacagttgctgactcccagaccttctgaacattttttcagaagatctgatactgccggatgaagaagatagatcaggaaagcatattttcttccggtttccaccagtacagagggaaaatttatttcccttccatataaaataagccacagaaacagacagatcactgcaacacaatttcctgtgtaaatttctcctgctccccggaaagcatattccatcatgctgagtgccacaccgaaactcatccctgctttcaatccccattgcatccattgctccagacgtttgcatactatcttatcctgatattcatggatcatctgacctgtaaggaaaaagctcattcctgtaaacagaaagtttctgtattccatagtgtgataaaatctgtcaaaaaaggcacaaaactccgctctccataaaagtattgccagcaatacaggtgccatacaatatgcagccttacgcattctccatttttcaatcaggagagcaagcagataacagtaaattaatgcaggaagaaaccataaatgtgctcttaccggagaagtactgttgtacacgaaaaattccttcagatgctctgtactcacaagcccttttatccatgtccatactctctccccattccaggctttcataaaacattcccagataaaataaaacacaactgaaactgcaaaaagcttcatgatatgcaggattttagacaatattctttttgaggcattgcaattttgataataacagaaatacccggataccataaagaaaaacggcaccgcacatcttgccagtacttttacaagctgcccggcctgtcccggaaaacttacatggatgcataccaccaggcacgcagcaatggcctttacagcatccagacttttatttcgcatttgatttctcacccacctttttctgttgtttcatctatagcagcagaacaatccgtaaatgtctgacctgacatcatttcagtcagacagataaaatcatctgcttcgctgctataatatatcaaagcgaaccacacatgtcaaacctcaggcagatacagaagtcatcagccagcttcggtccacccttgcaaggagtctggcattatgataggccattctgagagtcaggcaggtacgccccagatatttgcttccgtccgaagttttcatacacgccagtgcaaggtcgggttttcccggatggcggagacagattgggagcagcagttgaattgagtgattataatactgtggaattgccgttctgtaatctgcctcaagcattctttttgtctgtttcagcgcgccgtcaaacagctgcattttcatgctgctgtcacgtacttcctttggaagacgggcagcattttcctcatccccgaaaatatgctcgtactgtggaattaccggaagttttgtatcaaacacaagatctgacggattttccacatagcatgccttttccggcagacaggtgattccttcttttaacaaatagtattctgtataaaagccatccagaaaccagggctgcctgtccgggaccagattgggaataaaatacgcataaatcggctgataatagtaattaaagagtcctgtattaaatatggcataattctttttctcccacaccttctgttcttcataaaggcgtttaaatgtatgttccaggtatcctttcagaattccgttatcatctgtatccgaaaagctccacttctccggcaccatccttgccagattctgaatctgccgattatagtctccgcaataagtaaaatcaaataaattaatcatcaggctcctcctgtccctgcacctttcatattgtcattactgttctctcttaatatttattgtattttggaaaaaatatggcagaactgccagattatgatttgtatgaaaatcagttttgattgttattatttaacataccataatttctgtcaaaagacaaggattagcatcctccaaaaaatgtcaaaaatcaccatctgacttacaattcaaaagttactgttcactccgttcacagtaacttagccatccggtaatacctgatgcttgtagcctgccggtcagctgtgttatactctacacatatcagcaatacgcaaatgcaggctgaacaactgtttctatccgcatttgcgggcaagactatttttcttaaagaaggttttacaatgaaaaaagacggctactactcttccggagaatttgcacggatggcacatgtaacactccgcactatccgctattatgacaaacagaatatcctcaaaccctcctatgtaacagaatccggcgcacgtttttatacagatgaggattttgcaagactttcccagatcctgcttctgaaatatctgggtttctccctggatgacatacgggaaatgaccattgacgactcagactatcattttatggaaaattccctgaacatccagctaaagctggtacgtgaccgtatcgagcagatgcagctggtggaaaaggcaatccaggataccacagatgcgatccgctcccatcatgccatagactggaatcagatgcttgacctgatccatctgacaggcatggaaaaaagcatgaaaaatcaataccagaacgcctccaacatttcctcacgcattaatctgcacagcctgtattcccagaataaacaaggatggtttccatgggtttatgagcagtgtcagattcatccggggatgagtatccttgaacttggatgcggtgacggtgctctgtgggcacagaatatttccagtctccccggtgaagtttccgtcaccctttctgacctttcatccggaatgcttcgtgatgccagacgtgctatcggacgcaaagacagccgtttttccttcgaggcatttgactgtgcaggaattcctcatgaagacagaagctttgatctggtcattgcaaaccatgtgcttttttactgtgaagatatccctgctgtatgcagcgagattcaacgtgtgctcactccggacggaaaactgatctgcagtacctatggaaaaaaacacatgcaggaagtcagcagactggtccgggattttgacgaccggatcgtcctctccgcagacagactctatgagcgttttggcagagaaaacggagcagatatcctggcaccgtatttttcccgtattttctgggaaagctatagggactcccttctcgtccccgatgcagaaccgctgatttcctatatcctctcctgccatggaaatcagaatcagtatcttttggacaaatacaaagatttccggggatttgtatcgcgaaagacaaaggatgggttctttattaccaaggatgccggcatttttctttgtgaaaaataaccaaaatttaacttttttgtaaaaagtgcttgaaggtgacctaaggtcaccttttataatacaatcaccagagtcaggatgatatcgtaactcagactgacaatcagaaacccgttgattagtaccgcagtcgcctgatattttgcttatcatttacacagataactgacagaatatcgctccgaccgcatactgccaataacaaaggagaatacacatgaaaggtattattttagcaggcggttccggcacacgcctttatccgcttacaatggtaacatccaaacagcttctgccaatctatgataaaccaatgatctactatcccatgtctgtactgatgaacgcaggaatccgagatatcctgatcatctctactccgcaggatactcctcgttttgaggaacttcttggtgacggacatcagttcggtgtccatctcacctatgcagtacagccaagtccggacggacttgctcaggcatttatcatcggcgaagaatttatcggtgatgatactgttgccatggttctcggcgataatatcttcgcaggacatggactgaagaaaagactgaaagctgctgtaaagaacgcagaatccggcgagggtgcaactgttttcggatactatgtagatgatccggagagattcggtattgtagaatttgaccatgaaggcaaggctatctcaattgaagagaaaccggagcacccgaagagcaactactgtgtcacaggtttatacttctatgacaatcgcgtcgtagagtatgcaaaaaatctgaaaccaagtgccagaggcgaacttgagatcacagatctgaaccgcatctatctggaaaagggcgaattaaacgtagagcttctcggacagggattcacatggctggatacaggtacacacgagagccttgtggaagccaccaactttgtaaaaacaatggaaagccaccagcaccgcaaaatcggttgcctggaagagattgcatatctcaatggctggattacaaaggaagatgtgctgaaggtttatgaaatactgaagaaaaatcagtatggtcagtacttaaaagacgttctggacggtaaatatctggatgtattgcactaaccgaagcttttagacctgtacaaccgaattcgcagtcaagtgagtgatatatcaaattttcaaacagttatttgatatatcacccgccatgcagcaaggcggataattttatctgcctgactctataacagaatcttacagatattcatattatatattttttaaggagaatcactatgaacattatcgtaaccggcggtgccggatttatcggaagcaactttatttttcacatgttaaaaaaatacccggattaccgcatcatctgtctggactgtctgacctatgcaggaaacctttccactcttgcacctgtcatggacaacccaaatttccgtttcgtaaaagaaagcatcaccgaccgcgaagcagtttacaaactttttgaggaagaacaccctgatatggttgtaaacttcgctgcagagagtcacgttgaccgttccatcgaaaacccggaagttttccttaccacaaatattatcggtactgctgttctcatggatgcatgccgcaaatacggtatcaaacgttatcatcaggtatctactgatgaagtttacggagatcttccattagacagacctgacctgttcttcacagaggaaactccgatccacacaagcagcccttacagctcttccaaagcttctgccgaccttctggtgctggcttaccacagaacctacggactgcctgtaaccatcagccgctgctccaataactacggaccatatcacttcccggaaaaactgattccgttaatgatcgccaatgcattaaatgacaaaccacttccggtatacggaacaggcgaaaacgttcgtgactggctctatgtagaagatcattgccgcgcaatcgacctgatcatccacaaaggacgtgttggagaagtttacaacgtcggcggacacaatgaaatgacaaacattgatatcgttaagatcatctgcaaagaacttggcaaaccagaaagcctgatcacctacgtagcagaccgtaaaggtcatgacatgcgttatgcaatcgacccgactaagattcacaacgaacttggctggttaccggaaacaaaattcgcagacggtatcaagaaaacaatcaaatggtatctggataacaaggaatggtgggaaactatcatctccggtgaataccagaactactatgaaaaaatgtacgcaaaccgcggggaggcataatttatgagaatttttgtaacaggtgtaggcggtcagcttggacatgatgttatgaacgaacttgcgaaacgcggctatgaaggtgtgggaagcgacattgctccttcctacagcggaatcgctgatggcactgcagttaccacaatgccttatgttcagatggatatcactgacaaagcttctgtagaaaaagtcattaaagaagcaaatgttgatgctgtgatccactgtgctgcatggacagctgtagatgctgccgaagatgaagataaccagccgaaggtccgtctggtaaatgtaaccggaactcagaatattgctgatgtgtgcaaagagcttgacatcaagatgctgtatctgtccactgattatgtattcgatggtcagggaaccactccatgggagcctgactgcaaggactataaaccattaaatgtctatggacagacaaagctggacggtgaacttgccgtatccggcacagttgataagttctttatcgtccgtattgcatgggtattcggcaaaaacggcaagaactttatcaaaaccatgatcaacctcggaaaaactcatgatactctctccgtagtcaatgaccagatcggtacacctacttatacctatgacctggcaagacttctggtagatatgatcgaaactgaaaaatacggttattatcatgcaaccaatgagggcggatatatcagctggtatgatttcacaaaagaaatcttccgtcaggccgctgccatgggacacccggaatatctcccggaaaacatgacagtcaactccgtcacaactgcagagtatggcgcttccaaagcagccagaccgtttaacagccgcctggataagagcaaactgacagccaatggtttcacaccactccccacctggcaggatgcacttggacggtatctgaaagaactggatttctaaataaaaaaatccggcaggacacccaaatgacaggtgttttgccggtttttttattcttctctatgcagttttcttcttctgcgctgtctgccatacgcagcatcccacgatcagaagtattcccacaacatcagtcatcagtgacggatcgatcagcatcagtccgcctgctgccattaagacacgaaccggtacagacattttcactgacaggaagccttccagtgaggaggacaatccaaacacaccaatcagtgaggtgataaagatctgaacaaccttaagcggtgtggtatcgatcagcagcattgccggattgaagcagaatacataaggtacgataaatactgcgatagccagcttggaggctgtaaatgcagtcttcatcggattggccttcgctatggctgaacctgcgtaggcagccagcgctaccggcggtgtgatatctgcaacaataccaaagtaaaatacaaagaaatgagctgccagtgtaggtactcccatacgtaccaggatcggagcacaggttgctgccatgatacagtaattggcagtggtaggtacacccataccaagtacgatacagcacagcatagtcagaagcagtgcaatgatcagttttccgtttgcaacactgatgattccgttgatcaggtcattggcaagtcctgtcatggtgatggaaccggaaatgattcctgcaacaccgcaggctactgctacggagataacacctcttcctcctgcttccagcgcatcaatacatttggtaacactgattctgttttctttgtcaaaaagacttacgataacagaaagaacgattgcatagctggcagccttctgcatggtcatatagtttccggacacccagattaccagcatgaccagaggtaataacagatagattttacggatcagaagcttaaataccggaagtttttccttcggaattccggaaagtcctaatttctttgcttccagatgtacagaaataaagattcctgtaaagtacaacaatgcaggcagaatcgccctgacaataatgttggagtacggtacacccacaaaatctgccataaggaatgcggcagctcccatgatcggaggcatgatctgtccacctgtggaagaagcagcttctactgctccggcaaattccggtttgtagcctgtgtccttcatcatcgggattgtaacagaaccggttgttactgtgttacctacagaggaaccggataccattccacagagtgcagaactgataaccgctacctttgccggtccacctgcatattttcctgcaatgcagttagccagctgaataaagaagttggagattcctgttctctccagaaacgcaccgaaaataataaataccacaatatatttagagcatacatttacaggtgtggagaaaataccctcttttgtgtagaaaagattccgcaccaggaatttcactcttccccaaaatgccggattggtaagccctacagccagtgcatagatcaggaaaaaacctgccacaaacaggatcggcaggcccacgcatcgtctggtaagctcgatcagtgcagcaataccgataataccgatcacaatctgataaggggcaaatctggtaccctgattgatgatctgatttgcagaaaaagtaaaatacagaaaagcacctgtgcctgcgatcataaaaataatatcgccaatcggcatgtagttttctctgatatctccttttttcgccggataggtaagaaatccgataagaatgatcagccccagaaaagaagtcagtcggatttcctccaggaaggttgcaaataaggtaacatagatacaccacagagaaaaggcaaccagcaggccgcgtacagccagcttatatttgccggtccacacacgaatattggattcgcggtcgtatttcttcattactgcatctacatctgctgtgctcatgttctcagaaccagcctgcccttccggggatgtgtttgctttttttatcttattttctttcatcctgactattcccctttcgtatccactgtaattccatgctctgcataataacgcgccgcacccttatggaaaggaatggtcataccggaagtagcgttttccagagaaagctccgctccttttgcattctcagcagaaatctcgtctgcatggtcaaaaattgccgcagtcatatcataaactgtatcctcatccagagattcggacactacgatcgtcgccttgactgtgatggtttctacaggctcatcctgtcccggataggttcctgccggaatctggtaggatgtataatatggacagtcactcaggatcgaatccctgatcgcgccatcaatattaatcatatagacaccattggtagttgcaagctctgtgatagctgttgtaggtgcacctgcaacaataaacgcagcatcaatttttccatccttcaaagattccttgctgtcctcaaaagacagatactggggatggatatcatccagggtaatgccgcctgcatttaaaacatccagagcattgaaatatacaccggagtttgccgcaccgatagatacgctcttgcccttcagatcttccactgtcttaatgtcaggatccatggtaaacagctggacagtctctgcatacaggccgcccagagtcctgaaatcatgggttgcaccgtcctgttcaaatgctcttacgccgtcccatgcataggccattacatctgactggacaaatccaagctggaaatctccgtcctgtactgactgcaggttcgctttggaaccacctgtagaaaccgctgtaacctttacatttgtattattggtaatatactgggccagtacaccaccgtaggaataatacgttcccgccgtaccgccggtaccgaacgtcagacgttctttactttgtccgcagccgctcagaaggctgactgcaagtgcaagagtcaaaacaagaccaacaatcctgccagcttttctcctgcctctgaaaagctctttgtttctcataaatccatctccttcaggtacataatattttgaattataacatattttttcaaaaaatgataatctttattgaataatcttacaaaaaacgttacaataaaggaaaaacgtggataacaaaataaataacaacccaatggaggtatctattatgtccgaaagaaaataccctgtcatcacaatcagccgggagtttggtgccgggggacacagtattgcaagagtagtttcagaaaggcttggtatcccatattacgatcgggattttgcaaaacaggctgctgccagaagcggatattcccaggaggatattgatcgtgagggtgaaaatctgagccgcagcgccagacttctggacaacattctgaataactctgcaagttatttcagttcccatgatgctatttaccaggctcagaaagagctgatccttcagttcgcagcagaacaggattgtattattatcggccgctgttccaatcttatcctgcgaaatgccggtattcccagtctggatattttccttcatgcagatgtgaatctccgcacagaacatattcagaaattaggcttaaacggaaaggaagatcccaggaaatatctcaccaaaatggacaacctgcgtgaaacctatttcaaaacctatacaaaacatgagcttggcacttatcacgattatgacctgtgtctggataccggaacccttggatacgataactgtattgagattatcacttcacttgcaaaacagcaggggttgaatctgaagcatcagtagaaggaccgctgcaagctgcaaaacagcaacaaggctgtggcaatcagaaaatctgtgccacagcctctttacttcagtccttttaatagttgtttctaaatttcttttattttacaaactcatccagagaacggatctggattccttcttttgcaaaagcctctctgattttttccacaaacgccagagccttggctccgtctccatgaacgcagacagaatctgcctgaatatcaatatcttttcctgtaattgcagtaatctttttctctttgaccatacggatcaccctgacaatagcctcattttcatcagtgatcacagcaccttctttacgtctgtttaccagagtaccatcttcttcataggcgcggtctgcaaaaacctccatagctgtacgcaggcccatatcctgagcagcctttgccagctgtccgccggaaagagcaagtacgatcagactgctgtcaaattctttgattgcctcacagatcgcagtagaaagggcatagtcctctgcagccatattatataaggctccatgaggctttacatgctgcatttttacaccggttactctgcagaatgcatccagtgcacccagctgataaagcacatatgcttttgcctctgcaggggaaacactcagatttcttcttccgaagcccatcagatcaggaaaacccggatgtgctcctatacgaattcccgcttcctttgccattgccagcgtatttcccataactaccggatctgaagcatgataaccgcaggctacatttgcagaggagatcagcggaatgaccttatcatcattaccgattttatagtttccaaagctctctcccaggtcactgtttaaatctactgtatacattcattttacctcttttttatttatcatcctttgattttcagcacattttctataaatcccgtatctgcctttccgtcgcagaatacctgattcttcataatctgatactggaaatcaaggtttgtctccacacccatgaccaccatctcatccagcgcagagcgcattttctgcagggcagcctctctgtcaggtgcatgaacgattaccttcgcaatcatggaatcatactctgacggaatcttgtagcctgtataaagggcagtatccacccggactccgttgcctgccggaagatgcatatgctgtactactccgggacttggcatgaaatttttctcaggaatctctgcgttgatacggcattcaatagcatgtcctttaatccggatatcttcctgtttaaagcttaactcctctcccatagccacacgaatctgttcaatgatcagatctgtgcctgtaaccatctctgttactccatgctccacctggattctggtattcatttccatgaaatagaagttgcctttggggtctacgataaattcaatcgttcctgcattggtataacctactgttttcgcagcaagaactgcatattcattcattttcctgcgagtttcttcatcaatggcaggggaaggggattcctcgatcagcttctgatgatttctctgtaccgaacagtcacgttctcccagtgccaccacatttccatgactgtctgccatgatctggatctccacatggcggggattttctacaaaacgttcaatgtacatggtatcatccccaaaagcattggctgattctctctgtgccatattaaactgaaattcaaattcatcctcatttgcagccacacgcattcccttgccaccaccgcctgaggaagccttgatcataaccggatatccaatctcttcagccagttttttacctgtttctgcatcgtatacaggttcctttgttcccggtacaaccggtaccccggcatccatcatggttttacgggcatgggatttatttcccatcttatcgatcacatccgcatccggtccgataaaggtaattccgttttctttgcatttgcggacaaactcactgttttctgaaagaaagccaaaaccgggatggatagcatctgctcccatattttctgctgcagcaatgatccggtccatgttcaggtagctgtttctggcaggaccttctccgatacagatacgctggtctgccagctgtacatgaaggctcttagcatcttcttttgaataaacagctacacttcggatccccagattcctgcaggcacgtatgatccgaactgcaatctccccacggttggcgatcaaaattttattaaacaatatgaaagcctccttatcctacagtctcttaacacggaacagaggctgtccatattctactttctgttcattacttaccagaactgcttcaatctcacagtcatagtcactctggatctcattcataagcttcatagcttccagaatacacactgtctgtcctgcttttacctgatctcccacctttacaaaagcaggtacatccggagcagctgcagaatagaaggttcctacgataggagaagtgataaacagactttcctcctcttcttcctctgctttttccacaattgtattcacaggtgcagatgcagccacaggaactcccgttgcaactacaggaggatggtccagcttgctcattgtaatctttacatccttgtccttatatgtgaattcattaagggatgaatcctcaataatctttaccagtccttcaatcttctctaaatccatcaaacattatcctttctgtctattttatattattttttacggttattcttcaaacagcttgcgcagtctctttgccaccagacggcaatccagaacctctttacatggctgatgaatgatctttctcagtccgtcaagttctttcatttcctcaacataaagagcctgagcctcctgtacggtaattgccttgaaatgtatcttatcatctgtttttctctgtaccagcttgggaatatccacagatgccactgtggcaattttcccataaccgcccgttgtctgacggtcagccagcagaatgataggtttaccatgggaaggtacctgtatagccccaaatgcgattccgtcggaaataatatccgaagtctccttaggagcaataaacggtccctccagcctgcagcccatacggtcaaattcatttgtcactgtatactcactgcccaggaaagtctggatgccctgtttgctgaacataccatcctgcggtcccattactacccgcagtgttgcttctgtctgatcaaactcatccatatcaagctttcgggaaaggaaaaacggcagataacgtctcttaatacgaaatccgatataatcgtccgcttccagttttcttcccttaaatccgcccagaccactctttaaattggtgcatcggcttcccatcactaccggaatatccagataactggaaaaagcaatataacctctgcttcccgttctggcgcttccaaatttcagtacatctcccttattcatatacagggctgtatacatgggagccggctctccattaatggttggctggaaatctccgcctgtgattgcaatgatagtagctgatgtaaattcaagggttgggcctatcagcgttatctccaatactgcctcattctccggattatccagaagaagattggctattttgaatgaacggacatccatgactcctgccacactgaatccctgactctgatatccataacgccccagatcctgaaccgttgtcatcattccgccttttaatatacgaattcccattttatgcctcctcatgaacggtgcactggtattcgccacgttctactaattctctgatccgtttgtactcatcttcatcgatcggtacaaaacggatataatctcctgcctctaccagaatcgggatttcacggtccggatcataggtttttacaggtgtcattcccatcagctgccatcctcccggagaatccagaggataaatccctgtctgggaaccaccgattcccacacttcctgcattgatcttgattctgggatttgcaagacggggtgtatggatcctttcatccagcccgcccagataacaaaagcccggaagaaaaccaagcatatagatcaggtaatctctggaagaatgaatctttattacttcctctacggaaagtccggcatgttctgcaatattctcaatatccgggccatattctcctccatagcatacagggatctcataaacttttctgcatccttcacctgctgtaacttccatctttaacagcatttccagtctttttttcaggtcatcgtaggaaatcacacgcgggtcataattaaccagcaaagaacagaacgcagggatcatatctacaactccctctatatgctgttctttcataagctgtacagtggcagtgatcttccggttgatctccggactgatctctttgccaaattcaaccagaacagaagaatcaccttctgttaaaattctaatgtccggcataatctgctcctcttttcttaatcttttcgccatgtctttttatctgcttctttctgcatcacatggctgttaatgaaccaaaaaggtgcaacctggacgatcacacctttttgatatactctccagtctgaaaaccggatacattttcctcaattataacaatgtaccgatcttagatacaaatgtagtcacaccgaggtatgctgtaagaattaccacgatcactccaagaatggtaagtactaccggatgatgataattctctcccataatagatttcttatgtgcagcgatcagacagattgccagggtgatcggaagaatcagaccattcacagcacctgcaagtacaagaagtactgccggatttccaaggataaacataatggctgtagaaataatgataaatccgatgatcactttattttcattttcctcgatagacttgctgaaagtcttcaggaaggaaactgaagtataagctgcaccgataatggatgtgattgctgcgcacagaagaaccagacctgcaaaacggtatccgattccaccagccccctgcttgaaagcgtctgctgcaggatttgcagcatccagtgttacgcccttgacaacaacgcccagaacagccagaaacaggaaaatacgaacaatcgtagcaatgatcatacccataacagaactcttgttgatctctttcaggttcttctcgcctgtaattcctgcatcaatcagacgatgtgcgccggagaaagtgatatatcctccaacagtacctcccaaaagtgtaaggattgcaggaatcagatttgtggcaccggcttccggtacaaatgtattcttcaatgcacttcctaccggtggttttaccacaatgatcacaacaaagattacgataatcataatggcacccagtaccttggtaatagtatccatggcacttttggcatttttcagcacaaataccaggattgccaaaagacctgccagtatgtaaccaactttggtaggtattccaagcaatgtgttaaaaccaagtgctccgccacctacgtttccgatattaaataccagaccaccgaatacgatcagtatcgataccagatatcccagtcccggaagtaccttattggaaacatcctgaccacgaagtccggtcacacaaagcacacgccagatattcagctgtgcaatggctgcaaggattacggaaaccaggataacaaatccaaaactttcctgatactgtccggtaaaggttgctgtctgtgtcaggaatcctggtccgattgcagatgtggccatcagaaacgctgcgccaagtaaggctccgccactctttttcttttcgctcatttttattgcctccttttcatgttattattgcttattatactaaaaaatgaatatttacacaagcaaaagttgttttgacaacttttgatatcgaatttttataatctatattttgtaataaaaaacagcaaaggagtgcccggattcccatccgatacagctcccttgctgtttttcagtcaggcggatataatcatcctctttgttgtttgctcatataaccgaataactgctttgcagtttattcagttaaaatgtaaatttatccgcaaaatatgcatccagttcatcaatcttcacacgaacctgctccatagtatcacggtcgcggattgtaactgctccgtcgttttcggactcaaagtcataagttacacagaacggagtaccaatctcatcctgtcttctgtaacgtttaccaatgtttccacgatcatcatattcacagttatatttcttgcttaactgctgatagatcttctctgcaccctcattaagcttcttggaaagaggaagcacaccgatcttaacaggtgcaagtgccggatggaaatgaaggacagtacgaacgtcattcttctctgcatccagaacttcctcatcatatgcgctgcacaggaatgcaagtactacacggtcagcacccagtgacggctcgattacatatgggatatatttctgcttcttctcatcatcaaaatatgtcagatcctgtccggatacattctgatgctgagtcaggtcataatctgttctgtcagcgattccccacagctcgccccatccaaacgggaacaggaactctacgtctgtggtagccttgctatagaagcttaattcttctgcgtcatgatcacggtaacgaacttcttcatcttttaatccaagagaatataaccagttcaggcagaagttcttccagtatgcaaaccactcaaggtctgtatccggctcacaaaagaattcaagttccatctgctcgaactcacgtgtacggaatgtgaagttacccggtgtgatctcgttacggaaagatttaccgatctgaccgataccaaacggaatcttcttacgggatgttctctgaacattcttaaagtttacgaaaataccctgagctgtctcaggtcttaaatatacagtattcttggcatcctctgtaacaccctggaatgttttgaacatcaggttgaactgacggatatctgtaaagttatgtttgccgcatgtagggcatggtacattgtgatctttaatgaagttcatcatttcttcctgagaccatccatctacagagctctccagttcaattccgttctcctggctgaaatcctcaatgatcttgtctgcgcggaaacgctcatgacattccttacagtccatcagcggatcagagaagcttcccagatgtccggatgctacccatgtctgcggattcatcagaatcgcacagtcaacacctacgttgtatggggattcctgaataaatttctgccaccatgcacgttttacattattctttaattccacaccaagattaccataatcccatgtgtttgcaagaccaccatagatttcggaacccgggtaaacaaatcctcttgcctttgccagcgcaatgattttgtccattgttttttccatgactattctcctcgttctttttataaaatgcgtgtaactgttcatatccgtcaggcaatttggttcacaatccattccgctatttgattaacgtaataaacagctacaattaacgttattataactgtatctgatttctttttcaaggtatctcagctcattatttccagaatttccagacttttgaaccgtttttcagtgttcgcagcaatataggtatggatatgacgttccagttcatggagtacttcttctgtaacagtaaatgtataaagcttcccaagagaagcagttactatgtactgcatggcatataatgcaggtgctgagattctctttgcatcatttacatgtcccagacaggctttatccagaataccatgattctgctgagaaaagaaaagctcttctccctccacaggctgtctttcgcagcacacacaatgaaacagtgaaggacacaatccctgtgcagccatcatacgaagttcaaaaatacacctcaccagcctgtcatcaatattcgggttcagaagtgccttcactgtcacatacagaaggttcatagattctttctcgtcaatcccctcctgtccgaaataatctgccagttccagaaaataatatccatagtagattccaggctgttcgcctgccagttccacaaaatgatgactgatggatacctgattcagattataactggaacgcccctcataaagggcaaaggttccaaacacaaaaggattggcagccgccagaaactggctgtttgggcggcgggctccttttgcaaacgcggaaatcttgcctctttctctggtgagaaggacgatccgcttgtcatattctcccacaggcatggcagagagcactactccctgcacagttatcaaatcactcattctctctgtttcctgactgtctttttatttagatttccttcttatcgtaaccaaagttcttgataaggaaatcactgtctctccagtctttctttacttttacccaaagcttcagattcacttttgattccagcatacgctcaatctcatatcttgcattacttccgattttctttaacatcgcaccctgtttgccgatgataattcctttgtgagactctctttcacagataattgtcgcatcaatatccacgattggattttttcccggacgcgttttcatccggtcaatggcaactgcgatcccatgcggaatttccgcatccagtgcatgaagtgctttctcgcggatgatctcagccacgatctgacgctgaggctgatcagtaactgtatcctcgtcataaaacataggaccgtaaggcagatatttcaggatacaaccgataatatcctgtgtattctgtccacgcagtgcggagcatgggataatctctgcgaaatcgcatacttttcggtaagtgtcaatggcaggaaggatttcttcctttgatacagtatcaattttgttgatgatcaggattaccggcactccgattccctgaagctgttctgcaatatgacgctctcctgccccgataaaggtacttggctctaccagccacataatggcatctacctcttttaaagttcgctctgccacctgaaccatatattctcccagcttattctttgccttgtggataccgggagtatcgagaaatacgatctgaccttcgtcacaggtataaacggtctggatacggtttctggttgtctgtggtttcttggatgtgatagcgatcttctgtccgatgagatgattcatcagagtagatttacctacgtttggacgtccgataatcgctacaaatccggatttaaaattttcgttcattctgttctttccttttttaacaattgatcagtggtttcacttccatcagtacatcagaagcctcagccaccttgctctcgcttcccactacacagatctgatctgctgccagaactgcctctatgatctcggccagtgcatgaatatcctctgcagacgcattcaggatctgatcacgttctttctggagcatctcctctgtcacaccgcagaaatatgctgtcttggaaacagaacctttcatctgaggtgtcctgggaacatcctttccgctgatagtaccaatgatatattttgtcatctcgcgctcatctgcctgaaaattgcggatataatccggaatccccttatatacatccagtgtacgtttcagatgaggatcgcgataagataccagatagctctcaccattcctcttaaatccgctcatacatccatatgcaccgccctttacgcgcagattcatccacagataatcataacttaagataaccttcagaatttccagtgcacctgtatattccaggccttttttcttaaagttaccggtctgagccacatactggacctgtccggaagtcttaaatccctcattcttctttgtgcaggtcagcttctcttccgatttctccaccggctctgtgccaagtcctgcctttacagctcccgccagtttctgaactgtctccagggactctctctcacctgtataactgatcataaagttctccggacggagaatttttttcatcagtttgcaaagctcttctacagtttcctcttttcgctgttcaaaatctttttccagtttttcgataaactgataatatccgattcccgccatctcatcctggaatgcagccatcggagaagaatatgccgctgctctgagtacagcagtggaatgtccggcacctgtcaggtttacctgtgccctggacttcacagatgcaacaatctcatagagacgcttggtatcttccagtttcgagctgttcaggatctccccaatcattttgaaaaggaaatccatttttgtatagagtgccttacctcttacagagaacatagcctgaaactcttctgtagaatcagctctgtcaaaaacctctaccccacagttgataccgcctgtattggcattgatctcattaaacagttctccgtatgtgtaatgctctgtatccacatatccaagtacggatttcaaaagtcccagataaggaatctgctcaggtgcgatactgtcagtcttaaacatcagatctacataaccgatgccatttgtgcatacatcatggtaaaggaacagactgttgtctacagttaattcttcatttacgatctttgcagcttccttcttaatatcgcttctctttaacatcggaatgcactccagtgcttttggatcttcgccggcttcctgatatgcttccagtgctttcgtcttctcaaccattgcatccagctgttcttcagaaagactgcttctgtatgcttccagcttctcctccagttctttttcacgctgggctgccagacctttcttcggtataagagtcatgatgcatccatggggattttcaagaagatatttacggatcagttcttcaaaatatccttcgtttactgcctttttcaggttttcaaaaactgtaagctgctgtacctgtgcaaagggatttcctttttcatacagccagtctcccagaatatccagactgtacatcagtccttttggataagaggaaaaatcagcttcacgataacggaattcaaagtaattgattccagcctctacagctttcttatcaattccattcttaacaatatctcccagtacctgtctgatcacagatacgaattcttcttttctgtccggattggaaccttttgcaattactgtaaaatatggctggagaataccatcatcataagatccatagacatccttgcctgcttttacatccagaagtgcctgctttaacggtgctcccggtgcgcttaacagtgcgtaatccaatacctcaaatgccatcgccatctgactgtccgcagcatttccaacaaccatgttataagaaagataggtattgtcctcttctccctcattctcagcaaccggatactcaagagtcacatcccggcatgctccgaattctttctgttcctgaataacagaatccacatccagataatcaaaatgcgacagataatgctcatccaggaatgccagtttctcttccatatccatatttccatacagataaatatagctgttggatggatggtaataagttctgtggaaattcaggaaattctcataggtaagatccggaatatttttcggatcaccgcctgattcacatccataagtggtatcagggaaaaggtgattcataatctcccgttccagaacttcatccggtgaggagaaagcacctttcatctcattatatacaacaccgttatatttcagcggtccttccttctgttccagatgatagttccagccttcctgacggaaaatctcttctcttttatagatattcggataaaataccgcatccaaataaacatgcatcagattctgaaaatccttatcattgcagctggctacaggatagcaggttttatccggataagtcatggcattcaggaacgtattcagagaaccctttaccagttctacgaaaggatcctttaatggaaattcccttgaaccgcagagtacactgtgctccaggatatgtgccacacctgtgctgtccttaggcggtgtgcggaatgcaatattaaatactttattctcatcatcattctcgatcagcataactcttgcacctgttttcttatggcgcagaagccagcctgtagaatggatatctgtcagattttcttctgtcacaacttcataagccgtcaaattttctttgttcatgtatgcctccagtaatttttttttggcttttctttataatccgccttctcccgggaaatgtgcctcataaacttctcttgctgcccttgttatcatttccagttcttcctgcatgttgatttcctccggaaatgcaatggcagtggtataaatatcgttctgaatcttactctttgcacttttctcactgatatggacaatcccgcacaagatcgtgttataggccttatccttctcgcagagttccatataggttttgaccatatggcagcattctctgtaaagcagttctctgtgaagctcacttttctcctgcatttctctgaatttcagcctggtaagatttttcccgatttcttttctggccctctttaaaccaaacagctttcccgctgtatccttgttatattccattgccatccaaagtgccagatatccatcagcacgtgtaccggagcctgcctctgaaggttctccgtaacgcagttcccacagttccttacggacagcatttgcctcctcatcttcacctgccgcaatagactggtcaagaaacatctttcttttcatcggatcatgctctctgtaataaagagcaattgttggtgtgtctgtcatatatttgtcctttccggttactttatctgcaactgtctgctgcctttacagttacctttctcttacaatccaaaactctactttcatggctcttcataggtaagctctgtttctgccagagacagtgcctcttcaataacctgatccatatccatgtagcgatacatgccaagtcttccgccaaagatcacattcttctcttccagtgcgcgacgttcatatttgtcaaacagttcactgttcttcgggtcattgaccggatagtacggctctttgcctttctcccatgctgccggatattctctggtgatcacagtctttggctgtgtaccaaattcaaaatgtttatgctcgatgatccttgtatacggaacttcataatctgtataattgacaaccgcattgccctgataatttcccatatccagcacttctgtctcaaatttcagtgatctgtattccagttctccgtaacaatagtcataaaattcatcgatcatacctgtaaagagtactttatctgcctgtgcagtcagttcttctctgtttgcaaagaaatctgtattcagacatacctgtacaccctccagaagtttcttcacaatacgtgtatatccacctttggggattccctgataaggatctttgaaatagttattatcataagtataacgcaaaggcagtctttttatgataaatgccggcagatctttacactccctgccccactgcttccttgtatatccctctaccagtttctcatatacgtcctgtccaaccagtgcaagcgcctgttcctccaggttcttcggatgggtaatgtgcattcttgcgatctgttcctgtatcttcgcttttgcctctgcaggagtacgtactccccagagctgatggaaggtattcatattaaacggcagattatataactcatccttatagaccgcgatcggtgaatttacaaaatgattaaattctgcaaactgattgatataatcccacacctgttttctggaagtatgaaagatatgtgcaccgtatctgtgtacctggatcccctctacttcttctgtgtaaatattaccgccgatatgacctctcttatcgatcacaaggcatgttttcccccgtcttgtggcctcatgtgcaaatactgcaccaaaaaggccggctcctactatcagataatcatatttcttcatgtgcgacaccttcttcttgtaataatcaagcggataaaatcatccgcttcgctacttgctcataaccgaataactgctccgcagtttatcaggagaagtttctacttctcctgatacaagtaagtccctacacactacttattacttttcgcaactttcacaagggacttacttgattcggttaaaaaagcagtaacgcttttttgcgctactgccattataacaaattcatccgaaaatggatagtctttctattctattattttcctgtcactttatcaaacacatctgtgatttctttggatggtgcttttgtagccagactgaagataatgatcatcacaaggctgacagcaaaacctacagccagagaataaagtcctgtataagaaccaagagtctgtcctgctacaaacggtatataatcccagacgataactgtcagaccaccggaaacaatacctgcaactgcacctgtaaggtttgttcttctccagaacagtgacattaccacagtcggaccaaacgctgcaccaagaccggcccatgcattggataccagtcccatgatactgctgttcggattccacgcgatcacaaatgccagaacagacaccacgataaccgtaagtcttgcaactgcaaggatttcctttgagtctgcatccttcttaatgaactgatgatataaatcctcagatgctgcggacgctgttaccagaagctgtgaatccgctgtggacataattgccgcaagaataccgcagaggaagattcctccgataaacggaagtcccagatgactggaaaacagtttattgatcatctcgataaatacactctctgaggaagatgcaccattttcaccaagtacagtcggaagcagatatgcacgacctataataccgataaagcacgctgctgtcagagaaaggatatcccacacgattgcaatcgcactggatttttttaattctttctcactctttacagccatgaagcgggtaaggatgtgaggcataccgcagtatccaagtccccatgcaagctgggaaaagatttcaacaaatgtatatgggcgctctccgttctcaaaaggattcaggaaagctgctgctccacccggtgctccgctctgtgtcagaagatcactcagacttccgctcagtgtcagatatgcaaccagcggaacgatcagaagaccgatcagcatcagtgttccctgtacaaagtcagttacgcatacagccataaatccccccataaatgtataacagaggataactgctgcaccaattgccagagctatatgataatcaattccaaatactgtgttaaaaagtttaccgcccgctgccagtgcagaagctgtataaaccaggaaaaagattacaatcacgatggatgaaagcaataacaggattctcttcttatcctgaaatctgttctcaaaaaatgccgggattgtaagggaattgtttgctgcgatcgtatatttacgaagtctgtgtgaaatacacacccagtttaatacagttccgatgaacagacctacagcaatccagatctgtcctgttcccagtgaataaattgctcccggaagtcccattaagagccatccgctcatatctgatgcctgtgctgaaagagcagctacccatgcattcagtccacgtccgcccagaaaataatcttccgagctgcttgtttttttcatataaaccacaccaatgactatcataagtaacagataggcaacaaatgcggacaatatgaccattgttgtaccactcaaatttactcctccttttttcttctttttttcatacactctggatttgtcaaagtatgttctgtttccttcacatatttatccaaaaacagaatacagtcattttatatactgcaaaaagtaaccgggtaccacttctgtacccggctactttaccacattaccttagcatcacgcaagtgtatttcttgtttttcgacatttttccgccattttatggaattattactgttaccgtccggcaaagaccttcacagtaactgttttatatttttacacccaaacaggtactctgtcaatcagaaatttatctgttcctgtctgccagcctgtttacattctctttttgctgtatgttttctgcctgccagagcgtgtctgaaaaatgctttacgcaagatgtgcgtcacaatttgtgggagattttgttcggatgagggcgtcgtagtgggctacgacaaccgaattcggacaaaatataccgcaaagtggggcgtgcagattgcgggaatgatttttcagacacgctccagggctttatcttttttcagataaacattcttaatataggaaatcagtacctcttccccatgatcattaagtatccgcagcagtccctccagatctctctttgtcttcggatggataaaccacagcttttccttacctttcagataatagtccagcggctgatgctgatcatacttatcccccagataatttctagaagcactgatcctgtccatcaccatttccgcaatatatttacggggcatgggcacaccattgatgatatgctcatctcccggtgcataatctacccagtactcaaaatgatgtttgttgcgccctttatgatgaagccaggattttgatattcctgtatcttctctttctgcattgttgggacttctgtctccctgatagtatttacatccaaccagaaattccacaggtgcatatttggacaggtcatgaagcagtccctgtttatacataccagcccggaaacagtaatgcataaccaacagcttatgtctggttattgttttaaagtgcagccacggatgcatctttcttctcctcctctacagccatcagcaccacgatcgtacgcggtgtgaccttcagctttttactataagtttcctgttcctgctccaggaaaccattctctttcacagcactggtatcaatcactttcttccattttctatatcctgccagattaggaagcgcaaaaatacgatcttcccagtgaaagttatatgcaacgtatatggaagcatcctcgctgccgtctgcccggtgcgcataggcgccacaatacataattccaagcagtctggatgtgttctcagaattcatataccatgcgcgttctccatgaagggaaacatccggcagtcccctggtctgataatccactccgtacatttctcccggaacatgaagaatcggatgttctttccggaaagcaatggcattctttacaaactgaaacagggattcatttttcttcagtgctttccagtcaatccatccaacctgattatcctgacaataggcattattatttccgttctgtgaatttccaaactcatccccgccatagatcataggaacaccctgactgagcagcaccataagaaaagcatttctgatctgacgttctctcatctgtctgatctgcagccttctgcttggcccttccacgccacagttccaggaataattataactgctgccatcgtgattattctcctgatttgcttcattatgtctgtaattataggtcaccatatcattcatggtaaagccatcctgacaggccatataattgataactgcataggcattgggatttcttctgatatggtaagctgtcgctgaaaccatatcctcgtcacttttcagaaaacggcgcatatcctgcaaaaatcccggattatactgtgcaatacatttgtcttccggtttcttctttttccggatctggctctcatcaaaatcgtgaaacatcagccgggtatcacttaaaaccccgtcatgcatcagcaatttggcagaaactccctcacccaatacatgaaatccgtctacatgatagtaaagtttccagaactgcaatgccctgagtgctgtcacaggattacattctcgtgaaaaatacatttccatgatacaggcaattccggcctgatgcagttttttaatgaatgttttaaactctttctccggatcatctgttgcacagtaagatctcttgggtgcaaaataatagccatacatatatccccagaaattaacacgtccctgtgtatgcttctcagataccattttctcagattcagaattcttacaggtaccgctttccataaattcatatgcaggcatcagttcaattgtattgataccaagctctttccagtacgggatcatttcctccagtgcctgaaaagttccctttgtaccggttatcgtccgattcgcttttgtatatccgcgcacatgcagtttataaaggatcatttcgtgatatggaatagccggatttttgtcgttctcccagtcaaaaacttcttttttaagaaatcctcccctgactttgtgcggattcgtacccacctctgcaccaaagcgttcccgtcccagaatcctgtacgcacagggatcagtatacacctttccatttatcagaaaattgtactcgtactctttcagattaaaatccggaatatacattgcatatacatttccggttctgttttcttctgtaaaaggaatctccacataaggttttgctgatctctttttgtagagaatcagagatgctctgctgtcttccggtacctcaactgcaaagttacagccatctgccaacggatttgcaccaggcacaagagccagccccttttctgttttcatctttctgctctcagccatctctttctctccttcatattttttcttgttgctcattacacttttcagaaacactatacaacgctataatgtaatctgaagttctaccggacaatgatcggaacccataatttcagaatggatttctgcgccttcaagcttatccttcaactgtggagacgtgataaaatagtcaattctccaccctgcattcttctctcttgctttaaatctgtaagaccaccaggaatatctgccctctacatccggataaaaataacggaatgtatcgataaatccactctccagcaccttaccaaagcatgctctctcttcatctgtaaatccggcatttttccggttggtcttaggattcttcaggtcgatctcctgatgtgccacattgaaatccccgcagcagatcacaggcttactttcctgcaatttcaacaagtatgccagaaaatcctcttcccagtgcatacggtattccagtctgcgcagttcactctgggaatttggtgtatatacagtcaccagataaaatttttcatattccagggtgatcacacgcccttctttgtcatgttcctcaattccaattccatacgccacagacagtggctctttctttgtaaaaacagcagttccggaatatccccgtctgttggcataattccaatactgataatatcccggaagttccagcttcacctgcccctgctggcatttcgtttcctgcaggcagaaaatatccgcatcaagtgctgcaaagctctcttcaaaccctttgccaatgcatgcacgtataccatttacattccatgagattaatttcataatcaactgatcccctttgttttcttattagccctgttcagcatttgctaacgattctcccctgaacgcttctggtctattatagcacgtttcatgactgtaaaaaacctctttttctccggtttctgctcattgcatttttttccggtttctgctacaatgaactgacatcagataaacatagtccctgataaataagaaagaatgaggaatataaaatgagtgacgaatttacagctggcggatgtaacccgagtgactgcgcttcctgcggtggtggatgcagttcagccggcggatgcgatcctgttgaaaaccacaagacaatcacccttaccatggaagacgatacagaggtagaatgtgcgatcctcaccgttttcccggtagatgcgaaggaatatatcgcacttctcccacttgatgagaacggtcagaatgaaaacggcgaggtttacctctacacatttgcccgtactgagagcggtgatccgatgctttccaacatcgaaagcgatgaagaatatgcaaaagctgcagttgcttttgacacagtgcttcagaatgcaaaagattctatggataagattgactgatctgttaaagaatttcatatgtaagactaaaataagaaccatcatcatttcataaaatgtgtgatggttcttattttttatcttatagcaattccataaaataatgcaatcaagacagttcagcagagtgcgagtttccttatatagccctcctcgtaaattatgtatataagagaattactatacagaatttcgtcgcaaactgccataaatactactatgaataaaggttatatatcataaacactgcgcactttcagtccatccggctttccatcgagtatcttcactctgtattctcctgcattcatgtcaaaataattatcttcaagaatcaggtcatcattctcattccggatttccacactctttgcatatgcttctgccttaacaactatctcatctccgtctacgcgcacagccagtccgggattcagatagtggaagtatttcggataggaaaaaatcacagttccctgagaaataatctgatcattttcccatgcctcataacttacatattcattaaaacagtcaatctggggaagttcgaccttatccatccatacagcagacaatgccggtacttccagccactgttcttcctccctcagaattgtggcatctgtctttcgcactgcccatttcaccagaaccctgtgagcatccagcgtttcattggtcacattcagacggatggatttttcaaattcaaaatgctgacggttcatatccgcttccactgtcatccagctctgttcttcacaggaaagcattacaggcgcaaagaatctcttcgcataataatgaagcgctttccagcgtccgtaataatcaatggatgaccaggaaataaccggccaacagtcatttaactgccagtagattgcacccatacaacgtccccggtttctgcggtaatgctcgactccatatcggattccatctgcctggagaagctgagatgcataaacaaaatcgctgaagttctcaggataacggtatgctgcctgcatgtatttggcaatttttccatttcctccgtaatttctctgatgtttctccatcacataagaaaatggattcaattctttcggatcatctgttactgtttcaagcgtttttacagacgggaatgactgaaaaccaaactcagatgcatatctgaagaaatatttacgatattctgaaaatggcttattgccatgccatacttcccaataatgcacatctccacggttcggatcattgggttcatcaaaggaaccgcctgatgacgggcttgcaggccagtagaaggtatccgggtcgtattcgctgagaacttccggaataatgcgctcatacataaacagataatctctcatttctgtcggctttgtcacccaggtgccctgctttacaaacatttccatctcattgtttccgcaccacagggcaagggatgcatgatgacggagacgtttgatattatcaataaattcctgacggatatttgcctcaaactccggtgtcaattcatagacagagcatgcaaacataaagtcctgccataccatcagccccagttcatcacagagatcaaagaaccagtcctcaggataatagccgccgccccagacacgtactgtattaaagttcgctctcttgcactgaagaagtaattctctggtacgttctctggatgttctctgcagaagattgtcctcagggatatagtcagcgcccatggcaaagacctgataaccgtttacttcatgagcaaagctctcgccccactggtctttctctctatgcatggtcagcgcacggagaccgatttttctgcaccaggtgtctacaatcttatctccggctttcaggtctacctgcacctgatataacggctgttctcccagtccatttggccaccagagctgcggattttcaatctccatttcatccggacagtcatcccatatggtttttgttccattcggtgcagttacagtcacctgatattccagtgcctgtgcaccttcatacccatctgcttcgctctcttcctcatcaacagtctccacatctacttccggaaccagcaggactttgccatccttatgtacctgacggatatacacgctgtccagtctggcagtttcaattcccagaagtgttacaggacggaagatacctccatccggcagacatgcaccccagtcccagccgcacatatagtgagctttgcgcagatgcataaatccctcaattgtgtcttcatttcccctgtttttatatttcttaaatgcctctgccatgaacttcaacggagagcgaatgataacgcgtaaggtatttttgccgttttcaagcagctctcctaccgggaattcccagattctgtgcatgttatcaacttttccaagacaacatccattcagatagatgtccgcaatcgtatcaatcccgtcaaatctcaggatcacttcctgacaatctttaaactgcgcttcttcataattaaataccgttctgtattcataatcctcctccatcagtgctttcgcctgatattcattatccccaaagaacggatccggcatctttccggtcttaagaagtgccgcataaatatcccccggaatctgtgccggaatccagtccagttgtctgatattgcacaactgccagttttcatgaagctgtaattttatcatttgtcttatccctctttgattattttttacatatgtttgcattcaactatatatataatatcatactgcccttttctaaatcaactctgcaaaagaaatcattactgttcactccgttcacagtaacccgtttacagtaacaggaaatcttttgcttgacattcccggaaattctatgcacaataaagggaacagaaactatgatgtatggagtatatagaaatgaaagaaaagttatataccattccacttaatgatgcggtaaatgccagtgatgagtgtcctttctgttttattgagcgggaactggagcagaactcgctggattttgtactgggtaacagttcttcttatatggaaagtgacatccgggatcagacggataaggcgggattttgcagggtacatatgaagaaaatgtttgattatgggaatactcttgggaatgcattgattcttcagactcattatcataaacttcgggaagagatgagaaagcagtttgattctttttcacccggaaaatcctcggtcctcgcgcgtttccgccgttcagattccagcgcagataagaatccgattgctgcatggactgcttttaaggattgcagctgttttatctgtcagaatattgaggatacatttaaacggtatgtggaaacttttttctggctgtatcggcaggataatgaatttaaaaataaaattctgcgcagtaaaggcttctgtctgcatcacttcgggattctgtgcaacggtgcagataaatatctgaatgataaagaaaaggctgagttttatcctgccatgttcaggctgatggatgaaaacttccagcgtatggaagaagatctggtatggctgtcagataagtttgattacagaaataaggatgctgactggaaaaactccaaagatgcgctccagcgtggaatgcagaaacttcgcagcggatacccggcagatccggtgcataaggcaaaataaaaaattctctcttaacatttatgaaccaatatacttcatgatcatttgttaagagagaattttttattacattacaactccatcaatttctatatcagcatccacatcctgcgtatagtcgatatcttcatatcggaatccaaacatatgatagaaatcttcccagtaaccatcaatatcgcaatattcctttacagtgtctgtagtaacagctttccagcatttttttacttcttcctgaatctccggcgtcagttcgtaatcatccatacgaatgaaaccattctcatctgtctggaagcctgttggggtatagagtttctgtgtaaaaagccttgcgatctgctgaatacagttttcatgatttccggcccttttcataactttataaagaatagcaaaatacagcggtacaaccggaatagctgcacttgcctgagttaccagacctttgtttacagaaattactgcgcggacatccggatgtgcctgattaatctctgacattgttttctgtaagtgctgtttggcagttccaatggttccatgatagtagattggataagtcagttccggtccgatgtaggaatatgctacggttactgcattctcagtcagtacatctgccgctttcagtgcatcaatccagtctgcccagtcttcaccgcccataacctttacagtacttaaaacttcttcctctgtagcaggttctactgttttctctgtgatctcattatttctcagatccagactcttctctgtaaatggctcatctgtagttttcagacaggaagaccaggtctttccttctgcatctgtacgtctcggtgctgccaggctgtagactaccaggtccacttttccaagatcctgtttgatcagttcaatcgccttctccttgatttcctttgaaaaagcatctccgttaatggtctttgcataaacacctttcccggaagccagtctgtgaaactctgctgtattataccatccgggtgtagctgtccttctgccatttgcctgacgttcaaacatgattccaagagtatcagcaccacagttttccagtgcacagatacgggatgcgaggccgtagcctgtagaacatccgatgatcagtgctttttttgttccgtttaccattccctgtttacaggcgtaatctgcctggttgcgcacactctctgcacatccctgcggatgtgcggttgtacagatatattctcttacttttggctcgatgatcataacttttctccctgaatttatttctttgcctgatattttttagtcaagcggataaaatcatccgcttcgttacttgttcataatcgaataactgctccgcagtatatacgcttgaattgtatgtattgcaaatattttgaatctcaaaatattataacaaagaaaaagcagaacgtaaagtaaaaatctcagattcttccctatgttctactttttttacattctggctctgatttcatctataaactttgtgaaatatgctccgccagaacattacattacttttacccactatttcgcagtagtacttccaaatccaccattgcggatttctgtagcatcatcatctaccgtgattccgtactctacaaagattccctgcatgaatcctgtatctgccggaattgtcaaagttttgttttcattggaatcatttgtgatctttgaaaaaatgtggccttcgttatctgaatagaaataatcactgtcaatgataccaactgtgttgttaagctgaagacggtatttaaatcccagtccgcttctcggataacatttcagcacccattccggctgcatttccacccggattcctgtcgggatctttactgtttcgcctggcttcagagtaaattctgccggtgcgaaaaagtcatagccggcacttcctgctgtcgctctcttcggcagacggatagcctcgtatactttctctgcttcttcctgagactgtgcgaaggtatcgatccagtctgctgtgaagcgttctttgcttactttatgaaatttcgcgattcgtttcatctgttttcctcctgtctggtcatgcaaagctgacactcctgcttcgcagtacactcatagctgaatatttggttactgttcacacaccactatcccgagacaatatttgtgatcatcactgactgattcagtaaaaaagcagttcaggtacacctgacgcatacttgaactgcctgtatatttcttatttatgcaatacgacttttccttcatgaagagttttgggaacatcgatcactctctgattgctggaacctttccatttcagggaaagttctttcttgtccacctcaaattcaccgtctacacagacatccagataacgcacaatctcttctttgcggatctcctcccagaggaaacctgtataaagccagattgttttaccaggatatctctttctgatctccttcgcaaaggctgttacctcagtgatatttgccgggtgcagtggatctccacctgaaaaggtaattccgctcacataatccttatccagttccgcaaaaatctccttgcgttctgcctcaccgaaaggcagtccgccgtttggatcccaggtgacaggattctggcactccggacagcagtgattgcatcctgccacccagagcactacacgaagtccgtcgccattaagcatatcgtccttggtaatattgtgatatctcataattttttacgcttcttccggtacgtccttcatgctgaagctgattcttcccatcttgtctttgccaaggcagataaccttaactttatcaccaagtgtgagaacatcctcaacacgattgattctttctttacagatcttggaaatgtgtaccattccctctttacccggtgcaaattcaacgaatgcaccaaactctttgatgctgacaactttacctgtaaagatctgtcctgcttcaaaatcagttgcaatgatcttaaccatgttagctgcctcatccatgctcttctgatcaactccacagatagataccgcaccttcgtctgtgatatcgatcttaacacctgtacgctcgatgatcgtattgatagtctttcctctctgacctacaacatcaccgatcttctgaggatcgatctggatctggatgatcttcggagcatattcgcctacagctgtacggggagctgcgatgcatttctccataacttctgtcaggatatattctctagcttcttttgtacgtctgattgcttcttctacgatcggtcttgtcagtccatggatcttgatatccatctggattgctgtgataccgtcatgagttccggctaccttgaagtccatatctccgaagaagtcttcaagtccctggatatctgtcagaacgatgtaatcatcatctgtatcgcctgttaccagaccacaggaaatacctgctaccggttttttgatcggtacaccggctgccatcagagacattgtggatgcacagatacttgcctgagaagtagaaccattggattcaaatgtctcagatacagtacggatcgcatatgggaattcctcttcgcttggaagtacaggaactaatgctctttcagcaagtgcaccatgtccgatctcacgacgtcccggtcctctggatggttttgtctcacctacagaataggacgggaaattgtagtgatgcatatatctctttgaagtttcaaattcgtcaagtccgtcaagcttctgtgcttctgcaagaggagccagagttgtgatggtacagatctgtgtctgtccacgtgtgaacatagcagaaccatgtactctcgggataatatctgtctctgctgccagaggacggatctgagtaatggcacgaccatcaggacgtttgtggtcttttaagatcatcttgcggacagtcttcttctggtactgatatacagcctcgcccagaactgcaagccactcttccttgtcggcaaaagcttctttcagtttctctgttacctgacggatattttcttctcttgtctgtttatcgtcagagaatacggcaacttccatttctgccggaggtacgacctctttgattgctgcgaagagttcttccggaactgcacatgattcatagctgtgtttcggttttccgcattcttctacgatcttatcgataaatttgatgatttcctggtttacttcatgagctttgtagatagcttcgatcatcttgtcttccggaacttcttttgcgccggcttcgatcatgattactttctctcttgtggaagctactgtaagctgaaggtcagatacatctttctgtgccatggtagggttgatgatatattcaccattgatcagaccaacctgtgtggtagcacacggaccatcaaacggaatatcggaaatgcaggttgcaatagaggaaccaagcatagccggaatctccggattacactcaggatcaacagacataaccatgtttaccagtgttacgtcgtttctgtagtccttcggaaacagaggacgcattggtctgtcgatcacgcgggaagtaaggattgcatgctcgcttgcttttccctctctcttgttaaatcctcctgggattttgcctactgcatacattttctcttcatattcaacgcttaacgggaagaaatcaattccttctcttggctctttggatgctgttgctgtagataaaactgtagtatcaccatagtgcattaatgctgcaccgtttgcctgttttgcaacgcggttgatatctactgtcaaggttcttccggctaattccatggaataacttttgtacatatgttcattctccttttttcatattctggttattattttttcaaatctttctgtgaatttttgccttcccccaatcaggacagatattcctgtatcagacggcaattttcaaatttacatggtattacaatgtcacattaaaacaggagtccgaaacaactgaaaaaactactttttcagttattttgcaaaataatcttttcagtagtctcggaaataactcctgctgcgtttcatagtttctgaatatgcattgcatacacattaaaacaacaattccacttgcataaaaagggaggcggatggaaatccgcccccttccgcatactaaaaggctattattttcttaagcctaatttttcaatcagtgcacggtatctttcgatgtctgttttcttcaggtaagctaacagtccacgtctctgacctaccattttcagaagaccacgtctggagtgatgatctttatggttgctctgtaaatgctctgtaagttcctgaattcttgctgtaagaactgctacctgtacttccggtgatcctgtatcgccttcagttcttgcatattctttcatgatcgctgctttcttttcttttgaaatcattgtgatttcctcctgtattctataattattattgattgaccgccacacattaagagatggtcggagcgtccggtccctgaacatgggctaaattcaccttggttagtatagcacattgattctggcgtgtaaacctcttttttacaaagtttcaaaatattcctgtcccttcacagcatccctctccagctgtgccttcagtgcctccagcgaagaaaacttctgttcaggtctgaggaattttttgaaatctaccttgcagtattccccatacagatcttcattgcagtcaaacagatatgtttccacaccaataaacttctcgccgccaacagtaggcttatgacctacattggtaattccctgataacttctgtctctgaaatgggatactgtgatataaaccccgtttggaggcatcagtttctctaccggagggatcaggttggtggtcggaagcagatatttatgtcccattccacgtccatgttcaacgattccttctactgagaaatctgttcccataaggaaacggaatttttccatatttcctctgttcagttcttccctgacaaaggtactactaatcttacggcgtccgtccatttcttttggcaggacttccgtatgaaatccatatttctttccgaactctttgagcatggcaggagttcctttccgctcatagccaaaacggaaatcctctccaactgccacataggaaacctgcagatctcctatcaatatttcttttataaaattctctgctttcatgtgccgtattttctctgtgagcggacattccaacagtatatccactcccatttcttccaatatacgacatctctcttcctttgtgaggattgttcttgaggcagttccaagcgcaagtacaaccgcctgtgcaccttcctgtttctgctcaataattttctcaaccagtttctgatgtccgcggtgtatgccgtcaaacttcccaagtgttaccgcactgtgtgaaattctgggaaaatcattctcaatccttaaatattccatcatgtctcctaaaacatttttacagggaaatacctgtttcttttctcgtcccactggtaaactccggaaaaactgccttcactgctgcacatacggatccatccttttttctcctgtgcatcgaccagtgcctgtacaagaggatttccattagccagaagtctgtccccttcttttgtacagcatacccttggatactctgcaagaatctcctcaataccgaggattttactctctatggttccttcctgcactgcctcttctgtctgcgccagggtaatagcatcatccagtgtaaatctgcccacctttgtccgcaaaagactttccatggcagctccacagcccagcttttcccctatatcatggcacagagtacggatataggttcccttgctgcaggtcacacgaaaacgcaccagcggaaaactgatatccagaatttctatctcataaaaatgtacaggtcttgatttacgctccacagtcttgccctctctggcaagttcatagagtttctttccattgaccttcagtgctgaatacattggcggcacctgcatatagtctcccacaaaagaactgaccactgtgcaaagctcttcttctgtaacggaaagctctgtagtctgtgagagaacagttccgctcatatcctgagtatccgtaacaacacccagacgcatcactgcctcataggttttctctttatctgtgatcatatccaccagacgggttgcttttcccagagccaccgggagcactccttctgcatccggatcaagagttccggtatgtccgattttcttcatatgaaggattccccgaagctttgccaccacatcatgggaagtgaatcctttttccttacggattacaattactccatccatcagacttcctgctcctgaaactgtttgcagatctgttctgtcacattgttgatcacatcatacacagaaccctgaagatcacatcctgctgctctcatatgaccgccgccgccaaaatatactgcaatcttgcttacatccacatttccgttggaacgcagggaaactttgaaagactgagtttccacttcatagataaacatggcaacttccactcccgctgtaagacgaagctgactgacgataccatccaaatccttgccatccacaccatagaactccatgtctctttttttaagatatccgataatacattttccatccagaagcaggatactctctgcaagaacacgccccattacctgattctgcacataagttttctgatagaaagattcgtcaatgatcttactgaaattgaatcctgtcttcatcagttccccggcaatacgcatggtctccggtgaagttgaagagtactgaaatacccctgtgtcatgaaccattcccgtatagatcggcactgcaatggtacggaccactttctcaggatcaaaaagcccatagagaacttcacaggcagagcttacctctcccctgatatgattcacctgtgcaaatccggagttactgatatgatgatcaatacatgctgttctttttgcagtgtcaaagtatggacctgcaatggcaagtctgtctcttgcacttacatcacaggtaacaaaaaggtcatactctttgtcaccgtccagctctgttttaatctcatccatacagtcaatatgtccgaaaacaggtttgggattatccaggtacacatctgcctgaatttccggataataggtttttacatataaatataacgccatacaggaaccaacgcagtcaccatccggacggatatgtccgccgattcccattgttttcacaccttccagtatttccgcaatattttccatgttctcatcctcttttaattctcatcctgctcctcatcctgtctgtgggagttgctgtctttcttggtaacatcatcaataagctttgacatatttacaccatactcaatagattcgtccaggataaaacggatctccggtgtatttctcaggtttaaattacgcgccagctggcgtctgatgtagccttctgcactgttcagacctttgatcgtcgcttcctttgcttctttttcacccagcacactgatatatgctctgcaggttttcagatcaggagccacttctacagccatgacagaagtcatcggatgaatacgcgggtccttgatctcgttgcggataatggtgctgagttccttctggacttccccattgatccgggtattcttaatactgttttttctcattttaagttttactcctatatatccggcaattctgtcaaatactgtgagcaatccggatcatcgactatcctgatcacattattttctgaattaccacaatcaagtcaaggtgcgcaccacactgtacctgacactatgaatcgcgcaccctacctttataaaccattactatctcggtacttctaccatgatataagcttctactttatcttcctctttcacatcgttaaatccgtcaaatacaaggccacattcgtatcctgccttaacttccttaacatcgtctttgaatctcttcagggatgcaagctcaccttcaaatatctgctcgccttctctggaaatacgaaccttgcagtttctctggaagataccatcaagaatatagcttcctgcaatcgtaccaataccggatgccttgaacagctgacgcacttccgcatgaccgataactttctcctcaaatataggatcaagcatacccttcatggcagcttctacatcttcgattgcctgataaataactctgtacagacgaagatctacaccttcctgctcagcaagctgttttgcggttgcatccggacggacattaaagccgataatgatcgcatttgatgtagccgcaagacttacgtcagactcattgatcgcaccaacaccgccatggatcacctttacaaccacttcttcgttggaaagtttggtcagactctgttttacagcttccacagatccctgtacatctgctttgacaatgagcggaagttccttcagatcgcttgcctgaatctgatcaaagagattatccagagataatttgcccttagtctcctcaagaagacggttcttgttctcagatacaaatgcacctgcaaagttcttggcttccttatcactgtcaaatgcaagaagaatttcacctgcattcggcacatcaccaagtcccaggatttctacaggagtagaaggacctgcttctttaatcctgcgtcccttatcatccatcatggcacgaaccttaccattgcatgctcctgctgcaataaagtctcccacatgaagagtacctttctggacaaggatcgtggcaaccggacctttacctttatcaagctgagcctcgattacaagacctcttgcggaacggttcgggtttgcctttaattcacatacctcggctgtaagaaggatcatctcaagaagagtatcgattccctctcctgtatgtgcggatacaggaacaaaaattgtacttccgccccagtcttccgggatcagttcatattcagaaagttcctgttttacacgctcaatattagcacttggcttatcaatcttgttgattgcaactatgatctcaacgcctgccgccttcgcatggctgatagcctctactgtctgaggcatcacaccatcatcagctgctacaaccagaactgcgatatctgtggagttggcaccacgcatacgcatagctgtgaaagcttcatgtccaggtgtatccaggaatgtgatcttctgtccgccaacctctactacagaagcaccgatgtgctgtgtgataccgccggcttctccacgtgttacatttgtcttacggattgcatccagaagagatgttttaccatggtcaacgtgccccataacacagactacaggtggtcttgaaaccatatctttttcgtcttcttcatcctctttgaggagttcttcgataacgtctaccttctcttccggttctgcgatgatatcatattccagagcaatctcctgagctttctcaaaatcgatctcatggtttacggtaaccatcataccctgcataaagagcttcttcacaattactgacggctgcattttcatagcttctgccagttcgcggattgtcatcttctccggaagtgtgatttccttaacctcaggtttcttctcttcctgttttggctgcggagccggtttctgcagagctttcgggattctggaattcttattgaatccaccctgatttggtctgcgtccgccactctgtgtcttatcaaaatcttttttcttgtttttgttctctctgtctctttctctcttgctgtctttggaagtctttgtcagttccggtgcaaatgccatatcgtcattctttcttgtattctggcgctgtccctgacgtccctgactgccgccgaagcgtccgtcacgtccttcacttctgtttccgtccggacgaccctggccattgccctgcggtcttcctccctgacggtttccttcgccctgtggtcttccctgtccgaaacgtcctccctgacgatttccatcgccctggaatcttccgcccggacggccctgaccatcgccctgggatcttccctgtccgaaacgtcctccctggcggttatctccctgggatcttccatcgccctgaggtcttccctgacggtttccttcgccctggtttcttccctggccaaaacgtcctccctggcggttatctccctgggatcttccttcaccctgaggtcttccctgacggttctgtccgtccggtcttctgttgcctgtacctgggcggtcattattatttcttcttggtctttcaccgtctgttcttgaactgtcggaatttcttccttctgcatttcttggtgaacctgttctctcgccttcagctttcacaggtttctttcttgtttttcctccgtcacttgcattctgtgcatgaaaaacgcggataatattttttttctttttaggtgtttcagttttatctccttctgattttgctgttacaaccttttcttctgtcttgggagtctccaatttcgcaatatgctcctttcccctgttattattgtcttttctgaatttattctttacttccgaaaccgcaggctcatccaccatactcatatggcttctcacatcaacgccttttgatttcagaaactcgatcacttctctgttctgtcgtccaagctctctggccagctcatgtactcttaattttgacaatcgctatacctccttcatgattgctttcgcaaagttctcatcctggacagccagacaggcgcggtactcctttcccattgctctgcctaagctctctttatctgagaagaagaaaatcggaacttcataaaaactgcacatattcctgaatttcttctttgtattctcggaggcatcctcagcaacgatcacaagcagtccttttccggtctttacagatttctctgtggaaaattctccgcttacggtcttgcctgctttggtagccagccctatcagcgacagtactctgttatttttcaatatcttccagctccttcttaagtcgttcgtatacctcatccggaaccgcagttttcagtgaacgctcaagtccatgatttttaatcgctttatccagacattctctggaaagacacagatatgcgcctctgccgtttttcttaccggtagtatcaagcacgatctcatcttctgtagtcttaagaactctgagcatctctttcttgcttttcatttccctgcagccggtacactggcgcatgggaatcttattcttcgtcttcattctctcctgcttcctgagcctgtggctcttcttctacaggaacttcctctgaaacttcttctgcttcggtttcttctgtcagggaatcttctgctgaagtttcctctgctgatgcctcagctacatcttctgcagtctcgtcatcatcataatcatagaaatcaccggcttcttttgcctgagtctcactcttaatgtcaatcttaaatcctgtaagtcttgcagcaagacgtgcattctgaccttctttaccgattgcaagggacagctgataatcaggaacaactaccagagctgtcttctcatcaggatctgccataactgcgataacctttgcagggctcaatgcattctcgatcaggatcgcaggattctcatcccagttgatgatatcgattttctcaccgcgaagttcctcaactactgcattgacacgtgcgccgttcatacctacgcatgcaccaactgcatctacatccggatcgttgctccatacagcgatctttgtacgggaaccggcctcacgtgcgatgctcttgatctcaacagttccgtcttttacttctgcaacttctgactcaaagagacgtttcacaagtcccggatgagttctggataccagaatacgaggtcccttcggggtatccttgacttcaagaatatacaccttaattctctctgtcggctggaatgtttcccctttcacctgttcattctcacttaatactgcatctgccttaccaagattgatgcttacattcttgcccatcacacgctgtacaataccggttactacttctttctcttttccataatattcatcatacagcactttacgttcttcctcgcggattttctgcaggataacgttctttgcattctgtgtcgcaatacgtccgaattccttagactggattggaacctgtatcatgcctccgatctcagctcttgatgtgatcttcaaagcatctgccagagaaatctccattgcaggatcctctacgtattctacgatacttctgtctgcacacactgaaaaatcgcaggtttccggatcaatagttacatgtacattgtcagcttttccaaaatggttcttgcaggcctggatcagagactgctcaattgcctcaagcagagtatctttgctgatactcttttccttttcaaggatatccagtgcctcctttaactctctgctcatttttttcttatcctcccgaattaactaaaactctattgcgaggcgtatcagggctgtgtctttcttatcaaaaacacgctcggttccatcctcatcgattgtcacactgttactatcatatgcggtcaaaatcccgcagaactctttttgcttctcgattggccggtaggtacggatttccaccagttttcccatgtttctctcaaagtctttgtctttcttcagcggtctgtccagtcccggcgaactgatctccatgatataactgtcttcgataaaatcattctcatccagtttgtcactgaatgctctgctgactgtctcgcagtcatttactgtaattccgcctggtttgtcaatgtatcctctcagataccagtttcctgcttcctttacatattctacatcaaccagttcaaagccgttaagttctacgatcggtgccagaagttcctctgcgcgcttttcatactcttcccgtctgctcattttcccacctgcctttccatgcaacaaataagagtgggctcacgcccactcctttgtcaacaagttctaatttagatgtattgtaacaccaatttccggcaattgcaaggcttttcctgcaaaaaccttgattttagcggatttgttggttttatatacgtggttttattcctttactgtcccgtttggacaattttatcctgttgagaacatagggtttatcatggtaagtaatggtatattcctggcggctttccagaagatatgcatgatccagcttatctccttctgccagtttcattccacgtaccccgatagatgttttcttcatagcagaaatatcctgtttctgaaatcttaagaaatatccgccttcactctggaataccacctgttccatttcatccgcagaacccacaaagatcagagaatcctcttcagcaagtttcgtagacacgatcgttctcttcgccacatcaaactctgcaccactcaccagcttgcacatggatgcagcagtgacaaacagaagtgtattttcttttacagatgccagtggtgctacatagagcatacgttcctgtgcactgtcataattgctcagattatctgccggtgtccccttatccctgaaacgaaccagcggaatatctgccaccttgatactgtgcatctttccattatctgtaaagatacagatcttatctgtattcatacagttaaacacatatttgttctctgcattggcagcttctttatttctctcatatgcagacttatcaatggtccgcatatatccgaagcggtccataaggaatgtgacttccatttcttccatcttcttttcctcatagacaacttcttctgcattctcgatcactgtgcggcgtttcgtaccgtattctttcttaatctgatccagttctttcatgatcacttctgccatggaatcataattattcaggatatcttcataaatggcaatgttcttcattgtttctgcatagcctgcctgaagtgcctcgatctccagaccgatcagtttgtacagacgcatatccaggatcgcagctgcctgtttttctgagaaatgcaacttctgcgcagctttctcgcttgatttgctcttgaacctgattccttctgtcacaccgtcaaccaggcatttctttacctgttctctgttcttgcttcctcgcaggatttcgatgatcaggtcaatcacatcacatgccttgatcagaccttcctggatttctttcttctcctgctctttattcagaagtgtggtatactttctggtcgtgacatcgaatacgaaatctacgtgatgctcgatcacctgcttcagactcagagtctccggtctgccatccgcaactgctagcatattcacgccaaaagtatcttccagctttgtcttcttgtagagcatatttgtaaggttctctacatctgcgtcacgcttcaggtcaagaacaatacggattccctctttggaagactggttggagatatccacgatatctgttgtcttcttgttttccacaagagacgcaatatcattcagaaattttccgatatttgcaccgatcatagtgtacggaatctcagtgatcacaagctgctgtctgccgcctttaagcttcactgtctccactttacctctgacacgcaacttccctgttcctgtctcgtaaatcctgagcaggtcatctttatttactaccagaccacctgtcggaaagtccggtcccttgagatagcgcatcagccctttgacactgatatcgttattcttcatatatgccttcaccgcatctaccacttcacccagattgtgaggcggaatactggttgccataccgactgcaataccgtctgctccgtttaccagcagattcgggattctgacaggaagtaccaccggttccttctctgtctcatcaaagttcggcataaaatctactacattcttatccagatcttcgaggaagacatcctgtgtcagtttctccagtctggcttctgtatatcgcatggccgctgcaccgtcgccctcgatggaaccgaagtttccatgtccgtcgaccagtgttttgcctttcttaaaatcctgagccattaccacaagcgcttcgtagatcgaactgtcaccatgggggtgatatttacccatggtatcacctacgatacgggcacattttctgtatggtctgtcataacggatacccagttcatacatatcatacaaagttcttctctgtacaggcttcaatccatcacgcacatccggcagggctctggagataataacactcatggcataatctatataggatttctgcatgacctccgcatagtcggtaggaatcacattctcctgttttgtttccatttaatttctttcctccatctcagacacatatccatgtatctgtcttaatttccatataacactccggcaaaatcagatgtccagctctgcatcctgtgcatgctcatagataaacttctttctcggcggaacatcgcttcccatcaggatctctgtcacgcttgatgcaagtctcgcatcctcaatctccactcgcttcatcattcttgtctccggattcagagtagtctcccagagctgctccgcatccatctcgcccagacctttatatctctgaagagtaaagcttcccggtttatgggcacgtctgtatctctccagtgccttatcatcatacaggtattcctcctgccccttcttaggcatgactttatataatggcggcatggcaatatacacatgtccctcagtgatcagatccggcatgaaacggtagaataaagtcaggagcagtgtggaaatatgcgccccatccacatcggcatcagccatgatcacaatcttgtcgtaacgaagcttcgtaatatcaaagtcatttccgtatccttcggagaatccacatccaaatgcattgatcatggtcttgatctccgcattggcaagcactttatcaatggttgctttctccacattcaggatcttgcctctgataggaaggattgcctgataattacggttacgggcagtctttgcggaacctcccgcagaatctccctctacgataaagatctcacactgggacggatcctttttctcacagtttgccagctttccgttagagtcaaaggaatatttctgctttgtcagaagattggtcttcgccctctcctccgttttacggatctttgctgctttctctgcacaggaaaggatggtcttaagagtctccagatttctgtcaaaatagagtaccatctgctctcctacaacctttccggttgcgcgtgatgcatcctgattatccagctttgtcttggtctgtccctcgaaacgcggttccggatgcttgatggaaacaaccgctgtcattccgttacggatatctgcacctgtgaagttcggatccttgtctttaagaacgccaatttctcttgcataagtattcatgaccgtagtaaatgtagtcttaaatccggtcagatgagtaccgccctctgcattgtaaatgttattacagaagcccagtacattctcacgaaattcattggtaaactgaaatgccacctctacctgaatgccgtctgcttcccctttcaggtaaaccggatcatgcaggacttccgcgctgtggttcagatctttgataaatccaataatcccatctggctcatgataggtaatatcttcaatctcagaacctcttttgtcctcaaaatggatcgtcagttccggatttaagtatgcagtttcatgaagtctgctctttacctctgttgctgagaatcttgtcttctcaaaaatctccgggtctggcaggaaattaatactggtccctgtctgtctggtccttcccagtttaggcaaaagtccatcttccagttccagagtggggattcccctctcataatgatcatgatgtacatatccgtcacgactgatcttaatgtccagatatgtagacagggcattcacaaccgaagatcctactccatgaagtcctccgctggtcttataggcagaattatcaaatttaccgcctgcatgaagagttgtaaatacaagtctctctgccgatactcctttctcatgcatatctaccgggattcctcgtccgttgtctgttactgtacaggaaccatctttctccagaactacatggatcagactgcagtatcctgccagatgttcatctactgcgttatctacgatctcataaatgagatgatttaatccttttcgtgaaacacttccgatgtacattcccggacgcttacgaaccgcctccagaccttccaggacagagatgctccctgcatcataggtgtttttctttgccatgtctgttacatttcctttctttctatatatcaacatcaaccagattgcttactgcaaatcaggaaataatttttacgttgcaaacgtttgttcgtattataaccgaatttttattttttttcaagcctaaaccttccttgtcaatggaataaaacacaaaaaaataatcagaaccgaaattctgatccttttctgcctgtaagcctgttctgttataatttgagtgcatttatcttatcattggttttttcaactgtcaactttttctttctattcagctataaatcttctgaacgcaaaaaataaccagagcctaagctctggttaaattctcactatttttttagcagccagtacgggaatcgaacccgtgttttcgccgtgagagggcgacgtcttaaccccttgaccaactggccatttgtttatctgtcgtttgctcttcgctgtcgactcgtttaatatacaccatctttttctaaaatgcaagtacttttttaaaaaaatttcaatttttttatttttctcgaatttttcgttcaaaaagtcctgtatttatgcggtttttgccacaaaaaaatttttatttttttgtcccagagaagaaatgccatggcagctccaccgctttccatggcatttcccagttatttatttctgtttctgactgtttcttattcctttatatcctccgcaggctctgccggaatgaatacgcgggatttcttttcttcgtgtttatgaagtgctgctttctcagttgcctcaatacagaattccatctgagagttaatctgggctttgcctcgtttatccggcttcacataagttccatccggctgcaggatatgagcttttacattatccttaaactccagatcaagtacatgctccagctctttcttaatcttctcatcttccacagggaaaacaatctctaccctgcggtcaaggttacgcggcatccaatccgcacttcccatatagatttccgggtttccgccgttttcaaaatagaaaatacgactatgctccagaaattcccctacaatagaacggacatgaatattctcactgattcccggtactcctactttcagacagcagataccccttaccagaagctccacctgaactccacaggaagatgcataatacaatccagcaataatcttcggatcacagagagaattcatctttgcgcggattaacgccgggagtcctttcttcgcattctctgcctcacgttcaatcaggcttaagaacctgtccttcatccagattggtgctacgatcagcttattccagcttttcggttcagaatatccggagagcatgttaaatactgctgttgcatcttcaccaaaacgttcatcgcaggtaaagataccgcagtctgtatagagttttgcagtggaatcattgtagtttccggttgccagatgcacataacggcggattcctgtctcttccctgcgcacaaccagtgtgatcttgctgtgtgtcttaaggcctaccagaccataaattacatgacatcctgccttctccagcttcttcgcccatacaatattattttcttcatcaaaacgtgctttcagctctaccagcacggaaacctgtttgccgttttctgctgcctgagcaagggcagcaatgatcggtgaattgccgctgacacgatacagagtctgtttaatagccagaacatccggatcttttgctgcctgacgtacgaaatttacaacaggatcgaagctcatataaggatgatgcaggaatacatcgccctcacgtatcacctggaaaatatccttctcattctgaaattccggtacaggtgccggctgatatctcggtgtcttgtaagcatcaaagccatccgcaccatatactttcataagcatggtaagatccagaggtccgtttatctcaaaaatatctgcctctttgatatcaaattccgttttcagaatcttcagcaggcgttcatccatcttatcctctacttccagacggataacctcaccccactgacgtttctttaactggcgctggatctccaccagcagatcctctgcctcatcttcatcaatggtaagatccgcattacgcataatacggtaaggatgggcacatatcacatcataactcaggaaaagtttgtcaatatttctttcaataatctcttccagcaggatcactgtggtatctccatccttctttgacggaatctgcaccacccttggaagcacagacggaacctgcactgtagcaaacagaagttctcctgttttatcctttttgctgagtttatcactcttctccttcttggagatcagagcaccgatatttaatgtcttgtttctgatcagcggaaacggtctggaagaatccatcgccatcggtgtaagtaccggatatacattatcctcaaagtatctgtctacaaatacactctgtgcttctgtaagattctcatgggctgccaccaggtgcattccggctttctcaagcgcagggatcagagaacggttcagtgtattatactgtacatgaaccagttcatgggtacggacactgatttcttttaactgctccttggctgtcattcctgcaatgtctgttttatgatatcctgcatgtacctgatccttaagagacgccacacgcaccataaagaattcatccagattggatgcggtaatgcttaagaacttcagtctgtcaaacaaaggaagatttttatctcttgcttcactcagaacacgctcatcaaatttgagccagctcagctcgcgattcacgaaatattctttcttttcaaatttttcaaagtccataagttcatcctcctttacgctctgcccttgcgtctgagaaccagacgaatgccaaatacttcttcaaaaaatgcctctttatctttcagcagtcccagttccagggaaatgtcctgtgcagaatccacgatcatctgcagttctctgtctttgagcactgttttgattccttttactttctgataatgacttctgtccatggcattcgccagacgaaggattgcagtcatctttgccaccttgatatagctctctctgtcaatagcgattcccatactgtaaagttcatcataataaacaaacgcagaattattgaatctgaccgcacatgcgattatctggcgttccagaaaggacagcccaatgatatctgtagacataatgatctgataggaacactcggaaaccttttccatactgatatatttgccacagtcatgaagtagtgccgcgatctgcaataacagacgttctcttgctcccataccatgaactttcttcatactgtcaaagatattcaggcaaagattcatagttccctgaatatggctcttactgctggaatagcgtttcgcaatgttctttgatgtaaccagaatatcattctcaaaattgtggacacttttgagaaattttttcttctccgcaaaatcataggcaattccatccagcagggaaacacctggtgcccagagagactctgcattaaaaatatcaataaaatttctgcacactaccatagtcggtacaacaagggatgcatattccggatcaatctccatctcctgtgccaataagtcaacagattttccaactgtatcctcatagcgtttcataaactcttcccttgtaatgatcctgtcttccatttcctcctggaagatcatatctgtaataaaatctcccatcaggatcacattcctgatatccttatccttcagatacagacgctgaaagctcatcaggtcatttcggataaattcctcaaccagcttgtcataatgaatggttgttttctccagttcctgcagacgctggcggattcttaaacttcccattttaagtccctgggtagtgaccagagcatccttgtcaaaaagggaaacctgaaggcttccgccacccacatccaggattgcggtgcctttctggatcatctttttgaatcccttttctatagcagcaattgatttgtacccaaggaaatgctgttctgcactgcttaatatttcaattttcattcctgtacgctgatagatctgttcaatgatcagcagcggattcacaagttctctgaatgcactggtgccgcaggcacgatactcttccaccccaaagtcctgcatcagcctcttaaagtcgttcagcacctcacataaaacattcagcatttctgaatcgatctttccgtcagaatagacaccctttccgatttccagactgtatctgacatcattcagttcacgaaaaccaattctttttgacatctcaaagatcttcatgctgacttcataagatccgatgtcaatggctgcaaatgtcatgactgccatatgcgttccccctttaccattcatctatttgcttttttattccttctccacacccagcagatggtcgataaactgctgtgcagttcgtcctgtaagtcctccatgggaaagctcccacttatttgcttccagaagcagttcgtcctccggcatggtaattccgtttctctctgcgagagctttcacaattgtctggaattcttttttgctcggtgcaccataataaatacggacaccaaaacgataaaccagtgaaagcttctcctgcactgtatcggaggaatgcagatcgtcatcatccatgatctccagcttgtcactggatttctctcttaccagatgtcttctgttacttgttgcatagatcaggatattgtccggcttcttctccagaccaccctcgatcactgccttcagatatttatattcgatttcaaattcctcgaatgacagatcatccatatagataatgaatttatagtttctgttcttgatctgggcgatcacatcattcagatcctgaaactgatgcttatacacctcgataatacgaagtccctcatcataataacggttcaggattcccttgatacttgaggatttacctgtacccgcatcaccaaaaagcagacagttgtttgcctttctgcctcttacgaaagcttctgtattctcgatcagtttctgcttcgggatttcatatccgaccaggtcttccagtttcacatgagcgatccttgtgatcggctggatctccacattatcattctcatcatggcctacacgaaaagccttatgtaatcccagcttacccacaccaaaatccttataaaactgtaccatatccttcatgaattcctctgtggactccgctgctgccagcgttttgctcagatcacagatacggtctctgatacgggaattaaacatcttgctgttacttccggtgttggtataatcaccgagaaccttacagcaggaaattccaaatgcctcatccagtacagtcaggtcaaaatcatacagttctttaaacacaccgaaatcattcagtgccagttcattaatacttccgttgacagcccctctgatctcacaggctgtactgaatgcattttcattatttaccagaagaaatgtcagataacagtgccataaatttccggaaaagccataagcgccggcagtttccaccagtccgttggcacactcaaagaacagcccttccttttctttcagatcaggtgctttcttttcccaggcattcatcagttctgccattttatcaaggatttctccatgttcaaagttacggtataagatgcattcatttaatctagccatttttattacttccttcttaccttgttgttttatcttattgttctgctgtgagtggtataattatttcgaaaacgatgtaccagagtgtgtttgaaaaatgctttacacaaaatatgccgcaaagtgggacgtgcagattgtggaaatgatttttcaaacacgctctggcattatggaaatgatttttaataatttcccaaaattctcattctgtcagcttctgcctcaattcctctcagggcattcttcactgcactgtcctttaaatttccctcgaaatcaacaaaaaaacggtactgccagttcttccctgtgatcgggcgggattctatcttcgtcatattcagtccattataaataatgtgagacagcatattgtaaagagttccgctctcatgatgcagttcaaagaaaatactgatcttatgtgcatccttcacatagattggtttcttactcacgatcacaaaacgtgtggcattctgtccgttatagcagatattctcagccaggatcttcagtccgtaaagctctcctgcctgtctgctggcaatagctgcctgcgtcttgtcattgtcttcttttatcttcttggcagaaccggcagtattttccatctctttcttcttccagtccggatgagattccagatattttccacactgggaaagtgcctgaggatgagaacatacctgtctgatatcctccagttcagcatccggcagtcccagaagtacatgctccggacggatgatctgttctcctacaatgctaagctcatactctgtaagaagatcataaatatcagcaacaataccggcagttgtattctcaatgggaagtaccgcatagtctgctcttccctccacaactgcttccattgcatcacgccaggtttttacatgaaagctctcaatatcgtcctggaaatattccctcattgcagcataactgtatgcaccttccacaccctgaaagacaactcttacatctttcaacggaagtgcatctaccatttccagtttctcatcatcctcgattccatgctctgtgagaagctgatactgtctcttacggctgatcgccatgatctgctgaaaaagctcctgcgcaccaagctgattaaattctccatgtgccttacctctcaggacctccagcttctgtctctctctttccggatccagaaccttctttcctgtacgtatcttatattctgcaacatcctcacacaccttcattctctgttcaaaaagacgtatgatatcgctgtcgatcttatctatttcatttctgcattcctgtaaatctatcatttatgttatacctttttactttcacaaattctctacaatgtcagtcatctctccgataaaggaaagagagccaaaggcaatgatcacatcctgttccccggcaagtgaaaaagcctcctccactgcatctttaatcgtatccattgcctgtacattgggattgtattcactgacagtcttcgccagctctccggcaggcagcgcccttatattatccggagtctggatcgtaagtatccggtctgcaaagtgcacagttttctgaatcacacttctgtaatccttatctgcaaacactcccataatatagatgatccgttttcccttaaaataatgctctattgaagctgccatcatatccgcagcagcaggattatgagccccgtctaccacaaacagcggttttttacagataactgtaaaccgtccgttccagtttactgtgcgaagcccttcttttttctgctccgcagcggtggaaaagcccagctcatccaatacttttaaagcattcagtgcaactactgcattttccttctgataaacacctgccagcggaatctcatactcttcacccctgtaccggattgtctgtccaaggcagctttcctttagcacctctgcctcagaagcatctgctatggtacattttgcaccatgttctctgctgatcctctcgatcacctgcattgcttccggcttctgtctggcagtcaccactctgcagccgtctttgatgatcccggctttcttctctgcaatctgtgccagagtatttccaagaaaagacatatgatccatactgatcgataccagcactgccagcagcgtattcttaataatatttgtagcgtccagatttccgcccattcccacttccagcaaaacgagatcacaattctcttttttaaagaacagaaatgccaccgcagtctctatttcaaatgcagtgggatggggataaccatcctttgtcatagcagcaataacatcagacacctgtgtaatataagcagcaaagtcctctctgctgatcctgcttcccgaaacttccatcctgcctctgtaagaatacagggtaggcgaaacatatcttccaatgtgatatcctgcacctgataaaacagaatacaaaaaagcaatgacagaacccttgccattggtaccggctatatgcacatatttcagatcatcctgtggatttccaagacgtttcatcagctcacgcatatgatccagtcccaggacactgggaatttcccgggtgattttgtctatgtactcccggctttcctgataattcataataaactcctcttatttccatgagatcccctccacacgttccttttgcgcataaggcacctcattgctatagtgtaataacgtgttctcattatatcctacgtgtatgtttttttcaaggcaggcaatactagaatcatagaaatttatacaggagcgttacctatgaaaaaagctttcattctctgcggtctgacgggctggtgcatggaaatcctctggaccggactgcattccatcctttcaggagaacttaccatgacaggaaaaacttcccttttaatgtttcccatttacggatgcggtgccatcatccgcccgctctccggtaaactttctgctgtcccgctttttgtccgcggctgcatttatactgtcggatttttcttcgtggaatttatcagcggtgctcttttgcgctgttttcatatgtgtccctgggactacagcaacactcctctgaattaccggggactgataagaccggactacgctcccctctggttcggagccggacttttttttgagaaaatacttggaaaactctcttgaaaaaagcacctgattattatatgatgttatgaaggattaaataaaaattcctgaaccagtaaaatatggaggtatgaaatgagacacttaatgagtccgctggatctgtctgttgatgagttaaatactcttcttgacctggccagcgatattgagaaacaccctgataaatacgcacatgtctgcgatgataaaagactggcaactttattctatgagccaagcacccgtacccgtctcagctttgaagctgctatgatgaaccttggcggtaaagttcttggtttttcatcagctgattccagttccgcttcaaagggtgaaagtgttgccgatacaatccgcgttgtatcctgttacgctgacatctgtgctatgcgccacccgaaagaaggtgctccgttagtagcttctatggcttcttctattcctgttatcaacgccggcgacggtggtcatcaacatcctacccagacattaaccgacttacttaccatccgttccctgaaaggacgtctggacaatctgaccattggtctgtgcggcgacctgaaattcggacgtacagttcactccctgatcgaagcacttgtacgctacacaaatgtaaaattcattctgatctcaccggaagagcttcgcatcccaagctatatccgcgaggatgttctgaaaaagaacaatatcgaatttcaggaagtagagagactggaagatgccttaccagatcttgatatcctctacatgacacgtgtacagaaagaacgtttcttcaacgaagaagactatgtccgcatgaaggatttctacattctggacaaacagaaaatggaacttgcaaaaaaagacatgtacattcttcatccgcttccacgtgtaaatgaaatctcaacagaggtggatgcagacccgagagcagcttatttcaaacaggcacagtacggtgtatatgtacgtatggccctgattctcacattactggaggtaaaattaccatgttaaatgttggagcacttcgcgaaggttatgtattagaccatatcaaagcaggcaaggccatgactatctatcatgatctgaagcttgataaacttgactgcaccgttgccatcatcaagaacgcgcgcagcaacaaaatgggtaagaaagatatcatcaaggttgaatgcccggttgagaatctcgatcttgacattctcggctttatcgatcataacattactgtaaacgtaatcaaggacgagaagatcgttgccaaaaaagaactgaaacttccgaatcaggttgtcaacgtgatcaaatgcaagaatccacgctgcatcacttccattgaacagggactcgaccagatctttgttcttgcagataaagagaaagaagtttacagatgtaaatactgcgaagagaaatacacaggtaaacgcaataaataataaaacaaatatcaaaaaaacagaacggaagaaatccgttctgtttttttgtacgcaatcagaccgataagccgggttatgtcattgggtaatcatctgtctaggccttacgttgccataaggctcaagcgacccacctgaaagcacgacgggcagccgtatcgctttctattcggtcttgcttcaaatggagtttacatgtgcccggcctgttaccaggacggcggtagtctcttacactgcctttccacccttacctcagcaagtgaggcggtttatttctgttgcactggtctgggagtcacctccaccggacgttatccggcatcctgccctgcgaagcccggactttcctcgtctgaaccctttcgtctgttcagccgcgattacctggcctggttgcgcaaatgctattctagcacgttttttttcacttgtaaagaaatttcattcattactgttcactccgttctcagtaacgttgccaaaattcatttcaaattgcctgcggcaatggaatttatagcaatcctcgtaaataatgcatttaagacagttcggcagagtgcgaaagacaagaaagatatctgcaggcgtgctgacgcacggcaaagatatctgacgcagaatttcacactctgatgggctggattaagatgcattattttagaggattgctataggcttgtatgtctcgggattttggcatattcatgccaaaacacctcgcgggatagtggcgtgtgaacagtaactttcattctagtacatcgttttcgaaataactataccactcacttgtctgcgaatccgattgcacaggtctaaaagcctcagcgtagcccgctacgcctgcgtttttataccagcacactcgaatccgcatcctacgcgattggtatagttatttacgaaacgctgtactagtattttacacattaaagcagcttccgccgataaattctcttaaaatcgaattattcggcactgcctcgcttggcaccggaacaaaatattcaaagaacttcagcagcctcttcgcctctgtatactccggttcgttcttggcaatcccaaacaaaagcggttccgcatatactttcagacatgccagttcatagatcagcgcagaattaaacattacatctgcatcctcctggaacggaaagatattctgttcttcacctctgcgcacagacggccatcttgcaattgtctctttcgcggaagtccctctggtgcgggcatctcttacaattctgcggatcagacggccatccgtagtaggaattctgttgtgttcatcaatattcagctgagtcagagcgctgagataaatcttaaatttgctctcctttggcagcgcatagctgagcctgtcattcaatccatgaattccctcgatcaccagaatatcgtctttatccagctgcagaaaatcacctttatattctctggttcctgttttgaaattgaaaaccggcatctctaccctttttccttccaaaagctcaagcatatctttattaaactgctccacatcaatcgcttccagacactcaaaattcttttccccaaactcatctacaggagtcaggtgcctgtcaatgaaataattatccactgcgatcggatgcggtttcattccatgggcagccagctgaatggacagcctgtgtgaaaacgtagtctttccggaagaagacggacctgcgatcataacaaacttcttgtttccggctgcggcaatctcagatgcgatttccgaaatctttgcctcctgcatagcttcctggatcagcaaaatatcctggataccgcctctggtaaccttttcattcagatcaccaactgtcgcaatatccagtttatctccccattcctgagattccttctgcacacgaaaaatcttctccctcggtttaaattcaggtatccggtccggttcattctgagtcggaagctgcagtacgaaaccaccctcatacaaaaacagatcaaacgtcttaatatatcccgtatggttcgccataaaaccgtagaaataatcctcaaaacttccaatactgtaaagattcaccgcagagcttctgcggtaattaaacagcttctctttgtcatacatatgatgcttatgaaaaagtgcaactgcctcactagtgcttacgcttcgctttacaatgggaagattctcgtccacgatcctgtgcatctgcgcctttaccttatcaataaattcctgatccagcgccataggtcctttcattgtaaaataatagccgctgcctacagaataatggatcactacactgtctatattttcctgccctgccacatcataaattgctttcagaagaatcagacttgcacttctgcaataagttttgtgtccgatcggatctttggatgtcacaaattcaatctcacagtctgccttgagatgcttatgcagttctctcagcctgccatttacgatcaccagcattacaggtgcatccgtacttccttcgtattcctttacaatctcactgtaaggaatcttctcaggatattgttttgttattccctgtatcgtaacgttatacattttctgtcccataaatcctgcctccatttctgctataccgacaagtaaatacagttatcagctccgctgccaacaggcagatcagccaattttcatttataatttcattattatatggtaagaacccgtatcacagaatcgtgtacgggctctttacctctgcacaggagattttcagttccggaaatgcctgtgtcagttcttttttcattgcatccataaaaatatattctgttccgtagtgtccggcgtcgatcagcgccagtccctgcgcaaccgtatcaattcctgtatggtggtcgatatcaccggtcacatacacatccgcaccggccttaatgacatccttgatcatgctcttgcctgatcctgtacatacagcagcacattttaccatgctgtccagattcccataaacctttacatcatttaacttcagagactctttgacaagctgtgcatactctctcagtgtcatttcccgtggaagtttcccaactctgccaaagccctgtacttccccatctctctcttcagttatggaaaggactgtggtatcatgcatcttcgtatagtctgcactcagatccgccatacccagcacatcataattggtatgcatcgcataataaacaattcctttctgtatcagcgtaaggatctttcttcctgtaaagctatgattattgatcttcttaattccggaaaagatcatgggatgatgggtaatgatcatatctgccccatcctctatggcctcagccagtgtttcctctgtcagatccagagccagaaacacatggctgatctcatttgtatcatctcctgcgagaagtcctacgttatcccagtcctctgctgcatctgacgggtacttcttctccagccaggaggtcagttcatatgccttcatattcctctaaagcagcaataactgcctgcttttcctcctctatctcgcccgcacgcttctctgcattgggcgcattctttaatctgtcaagaatctcattgcggatgcgaagctctctttccagatactcccgcagaacaggatgctttctttccagaagcattcctccaaaccactcatctaaagtataaggagtatcttctgaaatatgcatcttttctccatgaattaccttcatcataggataaaacttgccatcctccagaaccatctcctcctctgtgatctgccagccgatttttctgacaaatctgcgaaaatgggggatatctgactgaggctgcaggatcatttcccgaaagctctccctgacctctgccccgtcagtaagaatcctctccatgagagggccgcccattcctgcgatcacaagagtgtcgccctctcccggtttcaaagcctcaagtccgtctgaaagccgggtttctatgtatgcgtccagtccatactgagaaatatgttcctgcgctctggacaacgggccttttcttacatccatggcaatcgcacccggaatctttccatccagataaagcgaaaccggcaggtatccatgatcgcatcccacatccacaagtctgtttcccctggtcaccaggcctgctattgcagacaaacgtaatgaaagctgcataacaggctccttagtccagataatccttcagtttacggctgcggctcggatgacgaagcttgcggagcgcctttgcctcaatctgacggatacgttctcttgttacattaaattccttaccaacttcctccagagttctggcacgtccatcgtccaggccaaaacgcaggcgcaatactttctgctctctgtctgtcaatgtgctcagaacctctaccagctgctctttcagcaaagtaaatgctgctgcatctgcaggtacaggtacattgtcatcctggataaagtctccaaggtggctgtcctcttcctcaccgataggtgtctccagagatacaggctcctgggagatcttaaggatctcacgtacacgctctacagacatatccatctcttttgcaatttcttccggcgtaggttcacgtccaagctcctgcagtaactgacgggaaacgcggatcagtttgttaatagtctcaaccatatgcaccggaatacggatggtacgtgcctggtctgcgattgctctggtgatcgcctgacggatccaccatgtagcataggtactgaatttataacccttgcggtaatcaaatttctcaaccgctttgatcagacctaagttaccttcctggatcaggtcgaggaaaagcattccacgtcccacatatctctttgcaatgctgacaacaagacgaaggtttgcttctgccagacgtttcttggcagcctcatccccattctccattctctttgcaagttcgatttcctcttctgctgaaagaagcggaaccttaccaatttccttcagatacatacgtaccggatcctcgatgcttacaccttcaggaacagaaagatcgatcttgtcaagttcaatctcttcttcatccagcttatcaatgtctgcatcgtcatcatccaggatcatatcatctgcattactgtctgtaatcctaagcacatccactccactggcttccagaaagtcaaatactttctccatctgttcaactcccagtggctgatccttaaagaagtcattgatttcctggtattccagtacattctttttcttcttggcaagctccagaagttctaccagtttttcactgaatttacccatattcatttccatatgtgctctatacctccatatagtgtttatattttatccttattcaaaagaaatatgcagctgctgccgctttcttccaagctcttccagttctttctttgcttttacaagttcctgcagtccctgtatatctgtgggatcccaggttctgtttctctctttcagactctcatccttaatcctgatcacagcatccgagaaagcccggttctgttcctccggagtctccagatggatcgttgcattaaaaagggatgaaacctctctctgctcttcactgtcaatgaaagcattcatcagccttgcaggattcacatcgccatccctgtgttgctggtaaagcatctctgccacctgcctgtacagaggaaccacgaaatctgaaggctggatatatttttccactgtgtcaaatatgcccggataagttaccagccaggtaagcatcagcttctgtgctttctctgctgcactctccttcttcttttgctgacctgctcccacaggtttaggctgaatcctctgctctgccggagttcccttcattgcaagagctccgactctctttttcagattctccacactgatcccactgtttctgtaatcctttacgattgcttctatgtaaagatttctctccagttcatcggaaagttccagaagcatctgtgcacaccgctcaaagaaacggttctgtccctggggctcctccattggaaattcccgctctgccatatgtacgcggaacataaagctgtccatagcctgctccagacgtttctcaaactcttccgctccaagtgccttgataaattcatccggatctttatgcggcttaagatttaccaccctcgaagaaacacctgcttccctcaggatcggaatggcacgaagtgcagccctcacgcctgcatcatcactgtcatacagaagcaatacctcctgagtgtaacgcttcagcagacttgcatgtccggaagtaagtgccgttcccagcgatgccaccgcattggtaaaccctgcctgatgcatggatatcacatccatatatccttcacacaggatcagataattttttctcgtggttcttgcaacattcagcccgtacagattccggcttttatcaaagatcgtagtctccggcgagttcaggtacttcggctttccgtcacccatcactctgcctccaaatccgatcacgcggttattcacatccatgatcgggaaaataactctgttccagaacttatcatacattcccctgcgttcatccacattgaacaggccggaatcccgcagcagttcgtcactgtaattctttgacttcagatatttgtacaaatcgtcactgtacttatccgaatatcccaggccaaacttcctgatcgtctcctcactgagtcctctgcctgtcagatattcatgtgcctgtctgccactctctcgacgcagctgataatagaaatatcctgctgcaagcttattgatctccagaagggcagcccgacgttctgctttcttctttgcttctccggaatattcaatcttcggaagctgcacccctgccctgtctgccagatgcttcagtgcctccccaaaggtataattctcatattccatcacaaaattaaatacattcccgcctgctccgcatccgaagcagtaatacatctgcttcgccggtgttaccgaaaaagagggagttttctcattatgaaacggacaaagtccaaaataggtacttcctcttttgttcagcttcacatactgggatacaacatctacaatatcattcttcatcctgacttcttcaatgatatcgtctgaataacgcatgcttcgtcctccttcttgatcgattaatagacttcccatgcttttggtatgtaaatctcccggaatttccttatagaatactggtctgtcattcctgagagatagtcacatactgcctgttccttcttctctccacgcacgatcagctccctgtattctgttgacattgcttccgggtgttcgacataatattcatataactccgtcagcatcttcactaccttttcctcttccttatgggctgccggattctcatatacattctgaaacatgagagcccgcagatccatcattgcctcgtagatctctgctgacatctttatggtatcctgctcaagactgttctctatcacatcatgaacaaatgtattgagccgctctctggttgtataaccgagcagcatccgaagcgtgatcggaatatcatcctcagaaataatccccgcccgctgtgcatcatccatatcatgatgaatataggcgatcttgtccgaaagtcttactacctgtccttcgagagtagacggattcccactggttctgtgattcaggataccatcccggacctcccatgtgagattcaacccttcgccgttcttctccagtacctgtgcaaccctgacgctctgtttatagtgggcaaagccatccggattcactgcatcaagagccctctcacctgcatgtccaaagggagtatgtcccaagtcatgtccaagtgcgatcgcttctacaagatcttcattcagtctcagtgccttcgctattgttctggcaatctgtgatacctcaagagtatgtgtcagtctggtcctgtaatggtcaccctggggcgccacaaaaacctgtgtcttatccttcatcctgcgaaaagctttactatgaaggatcctgtctctgtctctctgatagacagtccgtacatcgcattcttcctcctgccgctctctgcctctggaacaaagactcaaagcagcataaggactgagcatcttttgttcacgctgttccatgctttctctgatattcataagcgatacctccacaagctgacaaaatacctcttattaattatattctacataaaatttcaaattcctctttttttcaaaaaaaaattgaaatttttttatatttttttcaaaaaggtgttgacattagcttttacatttgatatagtatcacttgtcgcgagggagagcaaaagaatcccagagaaatgcgatatgcggaagtgtcggaactggcagacgagcaagactaaggatcttgtgagcattgcgctcgtgtgggttcaagtcccatcttccgcatttaaagaatgaggaactgtgagaagtcatggtgccttatttttttattcttttttctacaataattcttttctcaggtaaccattttccggtcccctgcataatttatcaggaaaacattatctacaggagcttgtatggctttttatcatatgcagatgcagcaggaaaatatagatacaggacaatatcaggttaccgtatcagaccggctgaacaatcgtcccatagaaaacgcacgcgtcagaatctcctacacaggagcacccgacagtaccattgaagaagtggcaacagattcctccggacgcactcctgttatcgaacttaaggctccacctctggaatacagtatggaaccggttgaacaacagccctactcagaatataccattcagatcgaagcagaaggatttgaaccaaaagaaatcgcaggaagccaggtattagcagatactttatccagacagccaacaacgctgaatgtcatggaatccggcgaaactttccagagaattgtaattcctccgcatacgttgttctatgaatatcctcccaaaatcgaagaagccgagataaaaccaataaacgaaaacggcgaaatcgtattaagcaaggtcgttgtccctgaatatatagtggtacacgatgggcctgtcaacgattccgctgcaggcaattattatgtacgctacaaagattacatcaaaaatgtagccagcagcgaaatctatgccacctggcccgacgacaccatccgggcaaatattctggctatcatgtcttttactctgaacagagtttatacggaatggtaccggaaccatcagtaattcggggtagcgtgaagaaatcattcagattaattttgaagcggatattcacactgtcctttgtgatatcaattctttcgatcagtttatttacaagcactcttttcgtagtagtatctgcattccagaatacatcctgccatgtggggattttacttcggatattttcccagtcatccatagaaactttcattgcatcaagttctgctttcctttcttccacaattcttttatgcttctgttccagttccttatgttttctgatgattcccgccagttcctccagactcagaggatagtctcctgtcatggcatttggaatgttgttctccataacagatattttctgctgaatattttccagttcactctgttccttatccagttcggactgcttaactgctttctgccggctctggttctcttcaatctgggtgaaaacatcctcattttcctgaagctttccgatatattctgcaagtgcctcaaacaccacaggctcaatctggtctgcacgatactgcttcgttttctcatggggaatcccattccatgcattcgggcatttgtaaatggcaattttacttgtacgcctttctcctgtatccttaattgtccagtaattatatttactgccattcgtcattttacgtccacaataaccacaatgcaggacatcaatcaacgccagcataccactgtttcttcttattactgtgacattctggttttccagagacttaatgtatttgtctgctctctgctttctggtgtcctgtacctgattccacatattttcatctataatggcaatctcagtatcaggtttctctgcaaatatccagtccttactgtccagtctgtgatatctgccatctactctttctctccgcttatacgcagtatatcctgcatagaccggatttgtaagaatactaacaatcgtaccacttttccagatatctctgggtgctctgtccttataaatctcatgttcattcagaatcttactgatcttagttgctccaaattctttatgtaaagaaagttcatagatatattttaccacttccgcctgctccggtacaaccactaaatgatgcaaagcacggccatgtttgctgacttctcctgaaagttccagtttatatccgtatggagcctttccacccatgaacttccctttctgcaccagcttctgtgcagtatcctttacgcgcatccctgtgtcagagctgcttttctgagcatttccatacctcagcgccagcatcatctgtcccatgatatcatcagattccggggaaatgcagccatctttaactgtataaatatccacgccaaagcttttcagactcatgacatatgcaccgatttcccacatacgcctgccgatacggtcatccttgtatacaaccaggatgtcatattctttcgcttttgcgtcctgcagcgcttcctgcagaatatttctgtctaccactgcattcttgtaaccactgttactgccctcgaaatattccttttcatccaactgccagtcgggctggttggatatgtagtcttttacaagctgtctctgtacacttaaatctccgtctgcttccaactgttggttggagcttacgcggagaagcattctgactctcttcattgaatttgtcctcctaaaaaatacaagggcaggatacttcctgccctattggttttaactaatacaaatcttttgggatttttccttcaattctcctgaaataattgcctttacttcctgtttaatcatctgatctcttgctgattttggtggaaattcaaagcaaatctgcataccagatcgtttgattttgacagtatcgtatttcttatccggcattttacctcctgcaagaatcgtcttttctacatgattattcactgatggcatggcatatgtaattttgttcacttctattacctcccgtgatattttctatattttaatatcttttttcttacataattttatctaaattttcatgattttgataatatagcatcgtcaacatcctgatcatccacttctatatcacccttaatcaaagcatatcctgtttttaagttacgtaacatcttgtaatatttggttattgcagtataatcaattatattggcaagtttcttctcatcaccatcatttggcttaaaataaatttttacagaagcctgatttaaacaatcaagttcttttttgccaaattgtgacaaaaactgcgtagccatcaaaagtgaaactccatattttcgtgattctgttaacatttgaaaaaacactgaattttttccaagagacaaactctgaatttcatctatgctgattacaagactatttttcactgctttactctttcggagttttttccagattatatttaaaataatctctattgctacacattgtatcttcgaatcataccctgaaaagtcgatcacattcaccttaccgggttgtattgtttctgcttttcttctaaaaatgttgctacttagcagagggtataatctactatatacgctacttgcttccggctcttttgcttctaatagcaaatcactcattgcatccagttctgtatcatatgcgtcagcaaagtcaggatcatctaccatatagccaattattttttgcaagcaaaacaactgatgtggaccaaaattttggcccagagtcaatatttcaacagcatgtccaacctttcttttttttgctatactatctatttcccgaatttctgaaagaaagttccattcaaaaccattttcaagcacattaattttatgagtcaattcattaaagaaatcataatgattcccgtccttatcaaaggcaatcacagtcttaccttcctttacagcatcatactctataccagccattctataagatttgccactaccagttttacccgtaatgagtatatggccgttcatgcattcctttgataatataatatcttctcctcgcaagctctttcccaacaccatttttactcctcctcttgaaccataaacatttctaaacaagctctgtcaaggttaatcatcctttttcttactgcgatcggattattcggcgattctttcagagtcaacttcttggtgaaatccgccttctccgattttaatgcaccacttttagcaagtgcactttttactctcctttcagatattactgacactattgggcgaattatttcttttaggcatctcgtcgttacccaaaaatctgttggcgtacaaatgattatttcattattttctaattcttcccatgtaacatcttttcgttgtttctgttgtatatttgacttctcaatgagttcggcaaaaacttctgttatgtcctccgaatcaaaagtagccagataataaagttctgttttttcttcaaaacttcttttcatatacttcatcgcttcataatattcatcttcatttttcaagagaaaatataacaaatctgatgctataatctgttgatgtctccaaaagctttccattttccaaggatttactttttgtgcttcttctttggttttattcccaacccaatgttctgcaatacttttatcacgtatcgtaagaagagttcctatatacatattatcttgaagcaatgtacagtcagcatctgatatattcaaaacaggaactctagaatcaacgagaaactctcccagactggaaacgttatcaaccagcaacactggaaaaaaatctgcttcaaacagaaatttctccaattccaaagtttttatatctggattgtacaacaatataccgataccatcatttggaacatacactttagaatttttccgcagtcgtatcacattaggaaacgtatttccaagataatccagaaaaacatttgccattcgcctattttctactgttaaaattattcctgctgttttacaatgttctttcaactcaaatggcactctgtacagtgcctgaaaaaatataagagccacaggtgtagacagccaatccaaaagaagctgaacatcatttacaatagaagcttcatattctggatatataacaatctcacctttcacgagacctcgccacgtttcttctgctttctgagtatatgtaagagacatttctttgttgtaataccatcccgttgaatacggaatttctacctctgttgctcgtgtcagcagatttgaaatcaatagtgccacttcctcagcacgctttttcttgccatttgccttaatctcaactccattctctttcaaacagcgaaccatatgttctggtgtattcaaattttcatttgtaatatagatttccgtatgccccttttctgtacaataactaaacctccagatagtatgtttttcttgcgtcaataaatctgttgaagaaatcttacgcaacattggatatgtcagattaataaattcatgtaccatctcctcatcatatgcatttcgattcttaatcaacggaacccctgctggagatatttccacaactttgtactcaccttcacgcttacttctgagccgttcacgatttcttctgcggcattcgtcagcagctacatctaccgcctttttttgtgctacttcatttacacgaatcatcgattctacctgacttttatgccaaacatcttctcgatcaacgctctgcctttgctgatacatctttggaatctgttctgtctcattattcatttgcatgcccgatgtagaattctgttcattcgttataactcgcattggctcatatgcctctgttttatgcttttctgctgttggcaaattcaatctgtaagtttcttcattcattactttctcattcacaatttttatctccatatttgcacctctccagttttctgatataattctaaagaatgttcccggtaacttcttttacactcattatatcttttacaaacgcatgacacactcccagttttagctactctatttctgggattgactattttgagaggattacaaatatgaaatctaataatgaaataccaaaagaatacactcgttcagatcttacaattctacttacagaaaaattaactaaaaatgaatttcatataagcaaaaacacatttgatgcaatgttaaaaaaggtcaaaacactggttatcaataacgcatttgactacaatctttattatattgatactttttataaggaatgtccctattttcaaggtaataataatcttagatgtgctattggcgcatttataaatcctttttatgctaccgattactccaaatataaaaagcaaactaattttccctacaaaataccaagaaatacctgtgttctttttctggcgaacatatacgctatctgcaacaaaaattttatgccaagcaataaaggatcattcaaaacaattcgagactatgtggattatatagatacatttatcgataattttccttatcaagaaattacatatttcgatcaaagtatatataaaacagtagaagaaatcagctctcttaaaatttttttaaaaaatatctttcacaaagaactcggtgctgatgtttatgtagcatatgaaaatttccgtacagaaatagacctatgccttagtcaaacaaatgctgaatatttctatttcatgccttcttgtaacctggctacccttcatactacttttcattatatagataacgtatttggttgttgggaacgtgtattattcggcaatgttcacgataaatctttttatgaaaaagcactttctttcttaaatataatctacaatcatttaaacattatgaaacgcgagactcaatctgattgtaatatactatttgatcaccttgttcctgtttctctatgcgatttaatagatttaaactcaaagaacctgaataacatcatcaatagaaaatcttctcaatttgaatcaatagattccatagcagaatattttgaaaataactttaatcagttaatagacttttattcaactcatgataattattttttcttttctcatcaccaagaggcttttattcacattctaaaacactgtcgtgatactttacgattatatttaaagagaaaaacagccaacacccaaagcatcaatattcaaactgaactacgatgctttcttgaaaacataaatcaacaacctatgattgaagaaactcaatcgccacgtaagcacataaatatccctctctcattaaaaaaatctggaacatttatgccgttcctagaaaggtatttcagcaaggaaaatatttatgcatcaatagagaatctccctgttccttcattaaatttaatttacccttccagcttcaacacagcatctgaaatcatcaatttatctgttccgataagcttaatggaatggaatcagttaactcctgaagatcaaaaaaaatttttatatgagttatgtactttttccaaatcattaatcaaaaaatatttatcatcatctgacgatattaatacatctgattgaccagtttgtttctttatctcaaaacctctaccttctggaacaccaacaaattctctgtttaaatgttccagaaggttcttttttatttttgagatatgtccgcaaatagactaacatttcgagacattcttctcatacttctgtacttgtcgatagaaagtacttcgtttcattttcaaaactttcattgctgtttttgctgttatatcaccccttttccatctttcatacacttctgggaacttttcgggcaatataaataccggtcttcccaaatgttttccctttttcttagcggcttcaataccttctctctgtcttttccgaatcgttaatctctcttgctccgctatgcttgcaagtacttcaattaaaatattctgaatcatctccagaatccatacctgcccttcaggaacttctatcaaagatgtggggagatctaaaatctttaacctgactctttttcttttgaaccattccaattctctttttatatcttccttatttctggaaagtcgatcaatagaagtgatatacagaacatccccctctctgagtccaaatacacctttaagtgcctgatatccctctcggtcagtattctttccgctgactttatcaaccacaatattctctggttttacatagtcctttaaagccactatctgtctgtccaagttctgctctgtgctacttacccgtgcatatccaaagatatttacattccttttctcattctgcataactccactctttccatttctgaatattccatagaacttttctctaaaaattcccattcatcatctgcaataaaaccctcttgccattccatacagtcaatcggcaatacaccccttgtaataaatgtcccataaaaattaacaagaataccttttttatacctacatggaataccatcactgtctccatcagctaattcccagaactgtaaccatttcggcacagtttttctatcaatccgaacatctgaaaaatatccagttactcctctgatcaccattggcatccaacgttcatttttagcattacatctcacttcattttcctcattcattccgaaaaaataatatttctcaactaccacaagacagctatagccttgtggtagtcgaagtatccttatctacatggaactaatattccgtttgtactatcataccgataaacatcttctgtcagcacctcgtcttctgcggtcatatctgccattgttttctttaatactgccttcagatcatccacgtctgccgtttcagcagcatgtatcatcacctcatgtacactggtaaataccgcataaaaatctccatccaacaattctgccaaacgttctgcaactcccggcaaaaataatgcagtcgctccattagttttttctctggtactcatacagtttcccaatggtcctttattcaactctgcagtaatatctgatctattcataaatccttcaccatcattccctaaattggaaatcatcttccaccagcaataaattcttggctcagacatttccgatgtattctccatcgccagttgaaatacttcttcctcgttcttattccatttttctatctgtgatttacgaagttttgtgctgataactcctccttttgtttctccaatcctaaaatatacagccaaagctatatcgccaattttcttatatattgcatctttcaggtccctttcatttctattgaaattaattgctctgagaattatctgtggttttgcatcttcaaaagttctcagtttctgtgcactcattaaaaatcctgtttcctgtacctgttgaatttctctgacaatattattaactgcattagaaatagtctcctctcgtggatcttcttcatataactccttgatataaatcccaagcgcacctacttctttctctgattccacacactcaatcaccagacgatcgcccgtttccgcatatttctcaccttttctgcaaagatatatcttttcttctggtaactgtaatctgaccattaatctctctttaagttccttaacaaattcttcgtatttaatcattactttttcctccattcatgccacatgagcactaaaatccatttcattttctgcttctgtcatatcaactgctattttgcttttaattgtttcatccgtagacaatgctctctgaaactccgtactgatcggagcatatttcaatgcctgttttattactgtcttctttgccatttcctcgtaattggtctgccacggtgaataagaacttccaaacgccttagaataagttctggcaaagctatccatatcttctttactcatacagctatagccatatcctccattctgtgtcttaaataaaccataaaaatagaccggctcacctctgtcagaagttgctggtctatggatcagtttgggattcaacccatattcaaactcaaattcatcattttcatatacagtctgtgcctgtatcgtctgcatgtttccattccgatacgccaatgtaatcaaacctttatatcccatctgaaattggcattccaactgtcctttatttttatatggaatcaaatatgcaagccccaacggtgtatttacttccagaccaagctgtgccgcatttaagagagccgcaataaaactcattggtgtacactgttgtaactgcggtgtattatttaatgcactaagggcaatacgtgtaaaccgctctggtgtaatcgctgatggtaatgcctttttcaattccggtgtcagcgctttaaccatatctggaatggacatattccgttttagctttacattttcctctgatggtgtctgtaacttatccgcctgttgtgacagttcctgcttcaagtccactttctctgttcttggcattaatctcctctcctttcccttatgccgcaggttcgtattttacctgaaatcttcgactgctgcttttctttaaataagtttcataaatatctggtttttctgcctttagtttattggtatccagacgattaacactggtttgtgaccatgaaatacgataatctggcgcaactgctgatacagcactacccatttgtaattttatcttctgatctatcgtcgtcttttcctttgtcagcttctcaatcagatgatccagttctgaacgtctatgtaattctttttccattccaaataactgaacttcctttttctcgtctgcatggaaagtatcctgcaacatttgggtataatcatcacttccatctggctctggaggatttttctttttaacacgttcaaaccagaaatgttcttcgattttaataagactgcggattgtttcttcatccctttcaatttttctgattacaaagtctcttccataaattaatgccgccacataccagcattcatatccagaaactgccagataatgctgcacctgtaaaagataactaagaggcactgcaccatctttccatttttctgctgaatatggactcactgttttgcattccagacctgctttctgccccacaatcaatctgtcgaaatctgcaagcatccagttatatttttcattctggaaaatataatttgcacgcttaactctcattcctgtttcttctgtaaatctttttgccacatattcttctaagtccctcccctgcttcatagcttcattatccgggatttcttttatcttttctgcaatcttatcctgatacacagagaatgcacttacatatggattcattccggcgattgctcctgcatcacttccacatattccctgttttctgtatttaagccattcctctttaggaagccctattgttgataccagacgtttcatattcattttcctcactttctgcctgcatatatgctgtaataatcttatcaatggtatttgatacattttcatccattgacctttcctgtctaatccatttctgataaaaatacatcagaagattaggaaaaatgagaagaatctccacccctttttctgatatgtcctcacaatgccgaattgctgatctggaaagttttttataggtttctactttttctacatcatctttaaatgtacctgttctttttctcagaatatttctgcaatactgactacattccatttcaattttatccctcaatagtttccttttatccatctctgtcctcctatgctgcgcaaagcatctgataagccttgtcaatcaaaggatttccttctactgttctggagaaaaggttctctttgaaattctttgtcctccgaataggctcagaatgagtcgcaaaatctgatactgcatttacaaaacggtatgcattatttcccacatctttcagatcgggtgcatcaaaatatcttttctgcatatcctcccggagtcggttaatgtttcggacatgaagagaattatcttcgttttcatatggaagaagcagctttatataatccataacctgacggtctgttaattcaatctttctaagattttcaaactctcttcccaatctggacatatatttttctgccataaataatgtctgttttgcttcttccatttttccctgcacgtctcctgtatgcaccattgaccatgagcgttttgccgttgataaagcaagattcagagtattattgcatactacacgaattggcgtaactgccactttaattgcccctgaaccatcatgggtattactgaataccagataaggactaatctgttctccattaataatgaactctcttggcattcttgccaaaatccatacctttcttccatccagaagtgctcctgcggtctcgtaacgtacaccttctccaagtaatccatctgtaaaagcaaaggcttcatcattctgcactaccttataacgatctgtaacaacgccaagcactttatcatccaaatctcttacgttggctttatatcctgggataagcaggttattatctgtataaattggttcctgacgaactttccagtttaatcctgctaattccagtgcatcttccgaacccggagcttccatcactcttgttcctaatccatgccacggggtttctcttacataaaacatagtttctacatttgctgccatttcgctgtcctccttagtgttttcttgtgataatctcaataagtttctctgctgcaatcctgataataatgactaattccacgcgtaagccctccattcttgtatttttgcgcataacaaaacagaacctcgaattgaggttctgctcattaatcactactataatatgtaactgaaataatctgttttacattatggcattcctaccacatatgtctcatttgttccattattagaccagtaaatatttactccaccatcataaaatgtcatcgttccacactctaatacagtgcctttcctgtcacttataattttcgccgtatcttctgatatctgttccaatccataagtaataactcctcctgcatctggagaaatcctttcactcttactcacatcaagaatgccgtcatatgacgaatcagatgcatacaccttaatgattcgataagtatctggattcgtataatatcctccatattggttaactaaatttcccgtattctcatataagtttgacggttctgactgttcattggacggaacaccataaccagcatcactgccattagtacttaaacatttactcaggaagttaatattatacagctcaacttctgacagacaggattcgtcaaaagattcatctggaatataccatgttttttcagcaaacaattctgctacctctggtgtttgaaaaacatatccatgtcttgcatatatttcattgattccatattggtacatccaagcctgatactgctctgaatatccctgaaatttataattggaagaatcaggaaacaaatagccatctgctttactggttccattaaaatcaacgatataattaggcattccatttaaattatcttcctcattatcctgagacattccatctccctgaaaagatgactgtatgattggcgaatcattactataatattccccgtttcctacgtctccttccataaccgtttcaatcaatatctgattatcctgtttcgtaatacgatccactttctgatatcccatatgaccatagacacaatatattccattgttatcatctgctgtatatagcaatactggattagaaaaatttccaatagattgtggcattccattttccaatgtatatacgtaattagtccaatcagcatcactttctccaaaagagataattaactcctttgttccatcctgatcaatatcatacaatgcatagtttccatttttgtcatatgtcgcagctgtatcttcaattacttccgcataggaactatattccggcatagaggaataatctacagctgaatccgtttctgatgctggcaccgttacaaaacaacaagtcagaacactaactgtgcacaatacagcttccatcatttttatccattttcttattactctttgttctttcattttaatccccttctacgttttttatttcattatacactccaagtatgtcataatttgtctctataaattttttcatataaacccaaatcctgaatcaacaaaaaaatttttcgcccgaagtacaataataaattttgaaatacccaaaactttaaagtatttttcgcccggattttttcaaaaactttttttaaactttatcaaaaatcctttttcaggcatataatttcgaaaaaattttttaacttttttcaaaatccgggcattcagcagttttccctacttttatccaaccatttgtttaataaaagacccatagctttcttcatctcatttttctatggccttcgattctaataatctctagaatcccccctgatagtgattttaatcactacatcactccctgctaatagtgattccctattctttcctttgcattcattctaatcataaaaacaacatggaattttcgcttaatatatgtatttttcttgaataagttctgcttgttcaagcggaaaattcgtaaaggcccaaacaacagcattttctcttaatagccgtgctctccctattgcttgtaacaattccccttcgatataccaaaattgaatgcgttgcaagttcaaatccttatatgtcataaacctaaactcgaagattccttttttcactcttcgatcatgtaatgtttctgttatatcataccccaatagcattgccgtatatttgtacaatgcttccggtttatgcggtgtacccacaactgcaatatttttcccctttagctcatcaaagccttctgttttgccaaaataaatctgtaaatctctggttgcatattccttaaatgtaataagtggaactacattttcggtaacattaaaaacagcgtctgttactttctcaaaagttaattttcttatgttttctctgcttaatggagcgtgagaatattgaatcagtcttcccacatattctactttaggaatctctctaaattttacttttcgatttttgcagaaatcttggtacattttttcatcagctgttgcagacaaaattgtcatttttacatctggaatttttatatcatctccccatatcaaagatcttgtatatctgtctacaataaaaaaacgagctaaaagtaaagaaagtacttctgcccattttatacattctcgaattctatcattatttacttttatgggcgcttcattcagaataatttctttttcttctgcctgatttaatatattttttatcgctcccacaaagtctaatggaaagtcactatattcacataattgccttagtgcatcaagacttatactttttgtataattcataattgtgcgcagtaaatcctcatccacaataacttcatattttttcaatagttttttgggcaaagccaaaaacattgcgtgtgttgttacaacaactttttcttctgctatcaagcttggttgttccatagacattcttattttttcttttagtccttgtgatatattcccattgatatcaagattttcccttatcagtactttggcaaaatctgtacgattagctttatatgcctgctcaactccttctatttcaatattattattttccaaaattactttagtacttaatgttggatatgctgaaatattcattttcaataatttttttactacctcatcctgtaattttaatgtaggcacaacaatcataaaatttttttctggattatctgaaaccatttcacaatatatggaagttttccctaatccagtttgtgcttttattatatgaatatcattatcttgtgattttattgattcttttaacgcttctcttaatcttttttccgcattttccaacgaaatataagacaacacttccgcatttttataaatttttttatcctgcaatttacttaacatattcgttggttctccacacactttgaagtatgggcacttatcaattccacattcttgtgaggaatattcctgtttgctaatataatcccactgtgccttccatttctccttatctgcttcaacaatcccctcaaaaaatagagattttccaccatgaagctgatacaggtttgtcgctaacaaaaatttttttccatgctccaaatcagctccattgatatgctcctcaaataatttgcagaattgactaatctttttttcatcaattttttgctttctctgttctctatttttctttttaagttttttacagttctgcttttcatctatgccagatcgtttaaaaactaaatttccccaaatataatcatccggcaaaacaacaagttctcttgcaaactttcgattatagaccggaaaaatgctttcattggttttaagcccatacttctttgaaatattaacgatttttctcctaaaatttccactgtcgtcttgtttcaacctggcatgcgcagctaatattagcttttcaatatctaacactgctgaaaaatctgtataaaacagctcttttcctccataaaaaagtcttgaacaatctttacattgattatcagtttccggaaaaacctcaaaaaacaataccaagataaattctgctatgttactatccgtaataggtttttccaacacaaaaacagctctaaatttttcaatagctttcgttgatgaaaacgtatgatataaaaacgctggatgcaagtcatattctttacaccgacataaaaaatcttcactggataagttatcatctatatcaattgcgaacacactttgctgtaaaaaagaatcctttgttttatgtttagcaccatctttaaatactgcaggcgtaaaactatgtccatactgtccgacagcttctgccaattcctctacagttatctcacattttaatctaagaattctattaataatacatggtgtttggtccgtcatttttttggtataccctttattatctacatataacaaaactttcattctatgactccttttcatagtatttataaaaatgatgatttttgggaatttgtttatttattatatgagttttccaacttttcatcatttttactgtatttgttacacattttttaattaaaaaatctctactgtactgacaagctgattcttgaaacaatcttgcaggctaaattttttatttcaaggcagaggaaagaggtgtagccatcgctacacctcctgatgacagcattgaaataaaaaacttagatgcaagattgttcgagaaatcaacttgttggtacactactttgtttattatattctgtacagttttagtgatatattttcatactcatagaaaaacataatattaaaaaataagattcgaggtaaagttctatgaataatttatcctgtatcctaccgttcagtaatagtgagattataccagaagtaatgacggtcgatgatgtatcccaatatttatgtattggaaaaaatactgtgtatgaacttctgcacagtaatcagcttaaaggctttcgaattggtaaatcatggagaatcagcaaagacgctttaaatctttacatcaaaagaagttccggcttactgtaaaacagtaagccggaacattttgtcaataagaaatttcttcatttaattcaaggcatatcaaaatttttcaccaacatttctctcgcctctttatgtccttgaactgcagcttttctataccacataagagcctttgatttatctattgcacatcctcttccaaaatcatagcttatccccactttatattgagcctccatatttccattttcagcagctttttcataccaaaaaagtgatttttgcttatctttctcgcatccgtatccaaattcataacattttgcaagtttacattgtgccggctcatatccaagtacagcagaatcctcataatattttactgccattctctgatcaaccttgcacatctttcctaaataatatctatcccccataacaaataactcttttgctttctgatttgatatatctggtatatccttatgtaatttatcatgcaaaaaatcatttgcttccaaaactgaactactaattgcatgactatttacaatatttttctttgcttctccatcttcaagaaccatttttactttacacattctatataaaagcgcaactaataatactgtgttttctgttataattttttcgtcttgtgtaaaatattcccaatccgttttattattaatcatcacaatattttcaagattgttcatatgatccttatagtttaattctactatttttaagctattattaaacttttcagctgcgctatacaactcttttaaataagaacatatttcatcaactatttttccttccttcgctgcttcagcatatacttcatctgcctgttctgatactgaatttcctgctttattgaaaataaatccacctaataatagcccaattccaagagtagaagcacctaacaccgcacttcccaaggcaattccacctcctccagcagctatagaaccacctcctaaaaatgccaatgttgcatttgtcgcagctgctccggaaagacttgcaattgcagtacctgttgaagcacttccaagtgcagttactgctgcagtagttgcaccggcagctgcaaatcctcctgctgttcctaatgtagctccaccaagcgccccaagaagaactcctgctcctacatacgctttctgtaattcttccggattatattcaggcaagttaatattctcttttttatatcccttaaattctggtctattctgtattctttctatgatatcggaaaatctctcgaaactctttaaaatttcaagttctctttttccaacttcatccatcaatgtgcacgtagccctattttgattttcaaatttatttatattatttttatgacgtatttccgctaaattcttcgtttcatttgcatcttttattttagatattccctgaactgtatccactacgccttttccccctgcaacaacacctaatgctgccaatattactggtaccatatcactttttctcctcttttttcattttctcacatatttcataattagctttataatacacttctaatgacatttcttttttcaaaaatctgtcataaaattcatcgactctgcaaatcaagggtcttgaatcataaatagagcatatactctttttcaaatatttacaggttccgtcccctctatccagttcaacatacacacccgttttattaaggtttctacaacaacatccacatttatcacatttgaacactattcaaataccaactttccttgtttatttgacatatgtgtatcaaaatccccattccatggcttcttaattcctatttcctcaaatttttcaagtaataatttattcagttcttcttctgaatttgcctgagaaaatatttttatcgtcttttcgaatttatcaacttcttttttatacaacaccagatcaatctgcttcagttgttccaaatattgtgtcaataattcattgattcttttgtacgcattaagctgtctttgaagagcatctgtcatttttattctaatacatacttcttttaaaactagaaccgcaaatcttccccatgcacataagttcatacgcataaaatacagtaggaaattaccgcccgatctaattcctgcatctattccatccagggcacataacgttccagtccctataagaagcatcactctcaaatctgcatttttagaagaaggaatacattctttaagtggtctgtgatactgaaaatgtcttctcagtgaccaaatgagccgaattgtaaactctgtgactactaccggtatagcctgtgtcattccaaatctgaaatcatagctcattactgccgaatttttctctggttgatatgtaaatgccatttgtgcaatctcagctaaagtttttctctcttctccgactttaaattttccaaaattacagaatccaaagaattcatagaaaggcatcgtaattcccattcctctattatgattaccactgctgccagctacatctgacattaaatgtccaaaccaatttgctataccacacattattttcattataaaattttcaccttttagttcaaaagtatcactttcaatcgtgatcaattgaccgtccgcaataaatgatgaagtcatagtaaactgatttaaaatcgaaaaaaataaaccaacaatatccggagaatgccccagtgacatcatatgatgcattttagccgatatttcaaatgctccatctacatcaacagttcttctctggtcatagttcactctaaaattacgctctaaaaatccaattgcagaattaacattattttcattttcatcttttggattccatttcattttttttgcaaaagccatgactgctttatcaacctgctgatccgtccactttcctaagattccctctcccggcatacctaccagaaaaatatccattacgcctccaatagctccacaagctactgcagccatataatcatacttatcgcatttatcatcatattgtaataaatttcgattggcttcacttgcttcaattaaatcactttttttatcagtaaacacatcaattcctccgctctgtcaatctgtaacaatatacaactatggttacacccactcaagtcctttttgccctttcaaccagatttctgcaccattccccacaacttcggcactaatcagatatttctcattttctttttcaatcacttttgctgtaggtattttatcaagcactgcgtctaatgccaaatcattacaccagaatttcagtcttttcatttctccaccccacattaacggagtttgattacgaaactcttgttctttaaatttttccgaatatggaattttgaaatgttcatttaatacttccaacttttcaattcgatctatgcgataaatcgttggtatactggttttgttatgttccgatgatgccccatcaatagccgccaacatataaaagtaatattctgaaaataacacacctaagggtttcagtattctctctacttttttatgtttctccaaacgctgatatagtatcttcacttttcgttcatattccgctgcctgagcaacttcccataatatattaagcagattttttccatgattcggtccctgataatttattgcttcatttgcgagatacttctttatttcttttcgcttactttcatcgccgcaaaaacttagcagatattccataacctgattcatttctacacatgacaatcctttacttcccaaaagtattttcgctatagcaaaaattttctgataatctgataatgtatcttccttttctgtcatgtaatagcaattacgatttcgatcataaacaacttctttcctaatctccccatctactgatttttcagccagataatttctgatttctgttatatctcttttaaatgaacgatctgagaccccggtagtattaatttcatctttcaaataaatgatttttccactggacaatctatcatacaagctaagtactctgcgcattttattgtactcagaatccataaatcacatcaccttctatattttttctctagccttattatatactttaggtatgtcattatttgtctctgtaaagtattttccatataagtctgaatattgtctaaatatatactatagtatcggttactaaataaactttatcatctcgaagtacagaaatcaagccgttactatatattaaggtgattaaaatgaataataattatagtatcggtcgaaaaatcagggaactacgccatcattgtggatttacgcaggaagaattagcttttcgtgcagatatttcatctgtctatctcaggcaaattgagaaagatgacagaaatccaaccatatcaacggttttgaaattatgcaacgctttatccattcaaccttcggaactttttgaactggaaacacccattcctccttcatcaacagaagaacaaatcgttgcttttctttctgacaaaacagaaaacgaaaagaaaattgctcttgaaattttaagaacggccttccaacttaagtcctaataattcgtatctactactgttaatcatattataccgtagtccattctgctcttcttagtttttttattgcttttagcaactgtaattaattatctctaaaatgacaaaaaataaaaatatatgaaagaacaaggaggaaaggcgtttgacctttcctcctgttctatatctttcctaaagattatattctttatataactgctcacgtcttttagcatctgttgatacaatcggaatttcttccgttctctgttcttgaattaatcgagtaatcaagcttccaagtcgagtttctccctgaacctgcccaattttagtatattttaattgcttcaccccttgcctgtccgattgcctctccttctgcacgtccaattgcttttccctctactttaagtctttcagattccagttccagaacttttcctccaataatatcacttattcctttccgaacattctcttcttttcgtaagatatagggtacattatatattaccagtatttcttcacataattactggcatcttctttagataaagaaaactcttccattatattttttacagcagcttcctggttaagtttaaattttttacaggttttaattgcaccagcaatcatgccttcctgaagtccctcagctttaagtctttcagattccagttccagaacttttcctcccatgatatcacctattcctttccgaacatcgtcttccttacggaaaatataatccgcaatctttacaattagctttgtcaaatctgtatacagttccgatttacctgtctctgtcagttctttctccagatttacccggatttcttcgtattcgtttaagagtacctgaaataattctggattgttattaaaatcatgtccttttttctcgtatctcataatataaaatggcaacagcatcaacagatttttctcaaagatactgtcttttgtataatcagccatttttatagtaggtatggaatataaatatgtatttccatctggaaaaactacatctgcttccagatagtccggcgtatttccagagcttctcagaaatagtacacaggactttggaaattctatccggtatctgcgtccctgtttctctgcatgttctatgccgattgcaaaatcatactcaatcattctaattaccattgtcgtatcatctgtgctctggcattcgatatgatacattttctttccgatcagcagacaggaatctgtaatgatctctccatcctccagctgatgttcattgcgaagctgtgtgatcttcacatcttccggatatgatgtatggaatacttcattgatcagcggcactgccagatatggcatcttctcgatcattgtacgaaatacatcatcaaaaatcgtattattcatataacactcctttttgtacttacattatagcattttaacgggttttattgaatacttaatctctttgaaattatgtatttttatctttggaatcagtggcagatactgcctgaaaaatcacttattagaaaatttagattactgcttacatcctatactatatagcatttacattcatatggcaagtccaatttgggcagttatttatttaatcttccttatctccattattttctatggtataagcgtttttcccatgaactttaatacataattcgtcaaattgaatgtttctgcaataccgaattagtgtcgattccgacgtaccggaacaaaggttatgactttacgatcacttcctccactgcctatgatcacaaatggatctatggcaggaatatctttgccagcattgaccgcattgtagatgaactgtttgagaattatctttccagaccaaatgtacgtcagccaatccttactcagtactgtgacggcaaacaggtacaatgccgaaacagaggatggatgacacaatggggaagcaaggcactgggcgatcagggatactctgccattgaaatcctacggactttttacggaaatgatatgtatatcaatgtggcggaagcaatctctggcatccccgcctcctggccaggatatgatctggatatcggtacatctggaaataaggtaaggcagatccaggaacagttaaacacaatcgcagaagcttatccagctgtccctgttgtcaccgcagatggaatttacggacctgagacccaaaattccgtcaggattttccagaacattttcggtctggaccagacaggaatcgtagattatccaacctggtacaaaattcaggagatctacgtggcagtcagcaggattgctgagttgcgttagggttgtagcaaagcagacaaaatatgcgcatcagcctgcaaagaactgatgcgcaagaatatatcacctatccctttcccttttcagatatcatctttttaagattacctcattccttataaattttcgacaactaccttgcatttcttcttacaaaaagcaattccatatgccagaatatcatttctgtcctcattacgaagccgttcatcataacgcagctcccgaatctggttcattgctttttcacaggctttttccagtccgacataaactcctgatttcgttatctgaaaaaattatagcaccattgtatttctatgtttctcttatacgttttgactacattttgtattccgcaatcgcagttcttgttctaagttttcgagcagttgatctaatatccggattacttccatcaactgttccttttccagattatcataatatactcctgccagcacagacaccggttgtttgacaagttcccatatttgctcagcccattttctggtaatgatatcttcttccggcgttctttcaaggttatatctgctgcccgtaaaacgcgattatcactgtacccgcttacgattcccgccagagttttcatactgcatggaatcacgatcattcccatcgtacggtagcttccactcgccggacctgcaccgatgttatagttatcatgtacctcgtccgcaagagcatatagctgttccaatgtataatctgtctcctgctccagcgtcatttccgcaccttttgtcacaatcagatgtgtctctattatttctttatactgctgcagttgtttcagcaattctattgtaaggggcgctccggaagccccactcataccgatgataagtctctttctcatctttcttcctttcctgactcttccgttcatattaaaatatgtttaaaaaattttccaacaatttgcacaaattatacccgttcgtttcctatttccttcgcaattcttcttttcacatggattattccaacaaagaatacgtaagaaagaatcctgtccaaaagactgttacatcacagaaacattgcagaataatcttctatgatataaaaagctcccctcagtatcacaaataataatcactgagaggagctgtaatttcagaacagcagagctgttttcttattaagatatcttcttagattaagaattttctttcccaatcttaactttacaatgtttccgataacaggcaatgccataatttacaatattcttcatcccgtcactctttaaccttgcagcatactgacgttgttcaatctgtttcagagcttctgtacaagctgcctccattctgtcttcctgagcatatttcatctcgatcaccactccgacacgattctccggaacttccagtaaaatatcacaataaccttcaccagattctatattcgaccagacagcccagttctccatatgacttagcagccccagcaaaactccatgataaaaattttcttttcttcccttaactgccgtatcccgaatactgattgtattccataaatagtcgttaaacaaatcttctatcgtttctgcatctccatctggaaaagccatgcataatttatcaagcttctttacatcctcagatgacttttcctgaaaccattccctgatctgaagttcaaacaattctttaatttctctgttaggaattgccagacgtaactttctgctgtctattctttcacgttgtgttaaataccctgttgtaaaaattatactccaaagattctcaatggatttatccagttcattatatgtcagttcctgttttatttcttttataaccgtttctcccgaaatcaggttttcgatttcatctctcgtctgtttattcgctttatctataaaacgactcacaatgctgttgctgctggtattagaccagaaatcttctggtatcgcatcaggatctgcacataaatttctgcaataactgatcacgtcccagggacaatacactgctttctttccaaactgataaccatcataccattccctgattgtttcatggtagtcagaaagcccaaaatatttcagcatttctgcgacctcatcatctgtaaatccaaagaactcatcaaactgtacactcgtaatcgaaaaaacattaaaattatttaatcctgtaaaaatgctttccttcgcaattctcaggcatcccgtaagtactgcaaaaaacaggctcgaatttgtcttcaaaacatttccaaacatgtttctgatcaaagataccatctcgtcataatatccatactggaacgctttatctaatggcacatcatactcatcaatcaaaagaaccgctttttttccataatgtttctccagtaatacagttaatataagcagcgccttctccattgtggcatcagacattttgaaatcgccatgatcatcaacgacagtcaatgctttataagagtttttttcttcctctgtaaggcggctgctctctgccagagcactaagtctccacgcctccattcccagagtattcttcagcgatttccgggctgactcaaaatttaatccctccacattcttcaatgtaagcgaaattaccggaaactttcccatatattcttcacacagttctttttcacgggataccttcagtccattaaacagcgatttatcacatccgatttccagaaatgactgcagcatattcatattcagagattttccaaaacggcgaggacgtgtaaacagattcacttctccccagttatgaagaagttctgttatcatttctgttttatccacatagtaaaaattatgcctgattattttttcaaaactatctattccaattggcagtttcttcctgttccgcatatttttcatcctccttcattaccagattttgcaagtcaaacggatattcgcaatccgcattcggttaaaaaatcccccgaaaaacagcttccctgattttagataatgataacatgaaacatttgtaacgtaaagcaggagttactgccacttcgagcccgactaagccagaaataataacagcaatttttatttcagacaggaattatttatgctaaaatatacctaattataacaattccgacgtaatttcctaagcataacaaaacagcagccattgcggtactgtttagagtatctcacaatggctgcctgtctgatatcacaatttcatttgttatttcttataccagaatttcttacatttcaccagtacctttccatccggagcatctgtcatcattccaattttgaacctgtaattttttgtctttccagccggaatatttacattgtaggttttggtcggtgttgcagtttcatccagtggtatctcaaaatacatcgttacctttgtaatcgtataactggaagtattctgcatacgggcagttatatacagctctcctgtgttcggattgtactcatatcccttgtagctgactttgagctggtttagcttaggtgtcgctgacttataccagaacgataagcattttaccttcggcgctttatatggctgctgagtcatttttccaatataaaccgtcttattcactgtctttccgggattgatcgttacactgaaggtctgggttatggttccatcctccataataggtatctcatatcccatcttcacttttgtaatcgtgtaactcgaagtatttttcagactcagcttcagatataactttgctgtatcattgtcatattcgaatcctctgtaagttactttaagctgtttggcagttggcttggaagcagctgatgctacccttggaaaaaataaaagtactgcaactgccgccagaagaaaaaataccagataacttctacattttcctgcaaatcgatttttcatactcataaaaatctcctcctctcttgatgtgccattatagtttcaggcaaatatcaggaaatacttttgatacacctgatatttttttcagatttattatatatttacaatacaatatcaggaagaaattttctattaactattggttagttttttataagcgccattacagtcatctataattttgattgtaattgacctaaaaagaagcagatctccgtttctgaactcagaaatgaaaatctgccaacttaacttatgatactaacggcaatatataattcacccaaaagcatgacataggcatgatcagcaccatcgccggtatcatgtccgcagttgggaagttcttcagcttcaccatacgaaaaccggttgcaagcatcagaaacccgccacaggctttaaagtcattgatcatgcccggcgtagtcagcggaaaaatcgccgttgctgcaaagaacaggatcaggaaaataatcacctgcggaatggcgatcatacacactaccattcccaggctgcaggcaaaaatagctgctgtaaataaatccagaatagatttggagatcagcactgaatgatccccgctcattccggatacgatagagccatagattcctgttccgcttgcacagaataatacgatgatcgtcaccagtgtattcataaactcatcctcagaaagctctgaatttgaattcttgataaatttgccgatcacacgctgcataacaccggcaccggcattgatcctttctccaagatgaatcgcaagtccgattcccgtaccgatcacaacagaaaaaataaccgccggcatattttccatcagaccgatggtgctgattcccattcccatagaacataccccgaatacaagggtaatatcctctttgaatttcggacttaatttgtgccccacaaaagcacccaggattccgcctataactatggataatgcattgataattattccaataggcataacctttttctccctcctttatcttttttcttcttcgtaaatattatacccatctctgccattctgttttgtcttatataatgcagtatctgcatttttatacagatcaagatatcctgttccatgttccggagcaaatgccattccggcactaatggtaatattctttccattcatttccggaaatgttaattctttaactttttttatcaaactttcgattctggaaacagccacttctctgctgtccgtttttctcataaatactacaaattcatcaccaccaatcctgccaacaatatctccttcacgaaaatgttcatgaagcacttcaccaaatttgtgcaggactttgtcccctgtaatgtgtccatatatatcatttacttccttaaaatgatccacatccatgatcacaaaagttcccggttcctgcgggtgttcctgcagaacattatggatccgttcttctgtacttctcttattgtacgcgctggtcagtgcatctgtctcggctgcctgaataagctgtttatcctttgatctgttcttaacaaatccccaaaggaacaacatgcttaccataacacaaaacccgattgtaaaaatcagttcatatcttcgtacaaagttataagatttctgcgcttcagaaacagggataacataacaaatcatccagtcattcaatcccatatctgtataggccagataacggtctgaattataatcatttccaattcttattttcaccagtccatcggcacccactgtaaaatcttttttcacttctgtcagggacgaatcaaaaataagtgtctgatcatcataaaatccaaagaagttatcgccatattcaatctcatgataggcaaaatcaccatcatacgcaataatctcaccatcactggtagtaatcagtgtatatcctacatcttcaaagaaatcgttaaacagcatacggcttaatgcagttacgttataagaaccacccagaactcctatcacttttccgtttttccagaccggtacgcccagaattacacgggtttctttatctacgctgctctccagtggatcgcttagtgtttcttttccctccattccttccttaaaatatctcctcgaagatacattcttctctgctccgttatcataatgagccgtaccatctgcttcaatcagtgctgtacgctctaaagcagtttcctcttcaagtgatattaacatttccatattttcatccgacacaagttcttcggattttccaatctcttttgctatacccctcagatatccataatgaatatccaaaattgctttaatatgttcactctgtctggaaacattcgtcttaattactttctgcgagttacgctcaatagaattctgcgtgcataccagaaatatgcccagacttactgctaccgcacacacaaatataagagcagcagctacatactccgtgatttcatttttctttctcataaacatctcctttcaccccacatttttctgtttgtcttttgttgggttacattatacacacactttcccgaaactgcggtcaaaatactttcactgttaatcctctgtaacagatttgtgtaatacatatatctgtcgcttaaaccttcaggacaattttaatatatcaaatcgaactgtgaaaatccagataaatcgtcaaattttcgtcaaaaaaagacagactctctattttctttcaagatatctgtctttttaatcatatacattacattggttctaaagtgtgtttaaactttacgcaagatatgcgtcacattttatgggagattttttcaaacccacactggtatgccagatgatcagatcagcttaacaatatcgttatacataacaaataccatcagcgccatcaacagcatcagccctgcgaaatggatgccgccctccacctgtctgttaatcggttttctgcggattgcctctatgacaaggaataccagccgtccaccgtccagtgccggaaacggaaggaggttcataactccaaggtttgcagagagcagaactgccagattaagcatattcatccacaggatcatggttccttcgcttttgctttcctcatacgtagttccgattgcatccacaattccgaccggaccactcagatctttcattccaagctttccgctgaccagctctttcaggctgagaatcgttgtacgtaccatatattttacttctacggcaccatatttgactacattcagcccttttgctttttcagaatacatattgtaggtaaatcctgattctgccgtacggtattcttttggtgtaaccgtaatatcatattcctgtccgtccctggaataggtaatctttacagacttttctgtcagcggattctcctgaatatatttctggtaatctgctgcatttgtaatcttcactccattaatggatgtgatcacatctccctgctgaatccctgcttcctgcaacggcattccatccattacagattccactgtcatggcagaagtatcatccccgttgaaattgcagcccagaaggtatctcacatttgtatccgacttataggaaatgtccatcttctttccatcacgcttaacagtcaggttaatggtatctccctctttcagctggttcagataggaatatacatagagatcttttcccagatcaatgtgatatccctgataaccggtaataatatctccctctttcagtcctgccgcctcagccgcagaaccttcctttacggaaagaactctggatggttcatatcctacagcacctacaatgatcacagacaatacaaatgccatgataaagttaaataccggtcctgcggcaactacagaaatcctgccccacacagacgcactgttaaaagttcccggttcattctctatgtccgtatcctcccccagcatggcacaggagccaccgataggaagaagtttcagtgaatatctggtatctcctttctcaaaactgtaaagtcttggtcccattcccaaagagaattctgtgaccacgatcttattcagctttgcaaaaagaaaatgtcccagctcatgaaagagaatgattgcactgaatatgacaattgcaataataattttcaatctaccacctgctttcaatccaacgataagtttctttctcaatctccagaatctgatccaggtccggatcctttactgctgtatgtctgctcatagactgcccgataatctcgtaaatatccagaaagctgatttttttctgaaggaatttgcggactgccagctcatttgcagcattaaaaacggttggcatactgccgcctgcccttgccgcttccaccgccattggaagacctttaaaagttttcctgtccggctcctcaaaggtgatctgcttcaacatatgaaaatccagtctgtcgccttttaaaaatcttctgtccgggtagcataatgcatactgtatcggaagtctcatatccggtgttccaagctgtgccatcactgcaccgtcctcgaattccaccatagagtggataatactctgcggctgaaccacaacctgaatatgatccagatctacatcaaaaagccatctggcttccataacttccagacctttatttaccagagttgcagaatccactgtaatcttctgtcccattacccagttcggatgcttcagcgtatcctccagagtcaccttctccagatctgctgttttctttccgcggaaaggaccgccggatgcagtgatgagcagtttatgtatctgctctcttttctctccatgaagtgcctggaaaatagcactgtgctcgctgtctacaggcaggatctgcacaccgaactgctttgccaacggcatgatcagatgtccggctgttaccagtgtttccttatttgccagagcaatatccttacctgcaaggattgcttccatagttggtctgattcctatcattcctacgatagcggtcaccagaatgtctgattcttccattctggcaagttcgataagaccacccatctggcttacgatttttacatccagatcctgcacacgtactgccagatctctggctgcctcttctttccagactgcaacaagtctgggatgaaattcacgtatctgcttctccagcatttctacattgctgcctgctgcaagaccaactacttccaggtcatcatttgcacgtaccacatccagtgtctgtgttccgatcgaacctgtagaacctaagactgctacttttttcatcttgtacctcatttcaatacttatacaacaattttataaaattacttctgacctgacagttctcatatcagaaaatactgtaaacatgtatatcagaagaatatatgctccgttagagcgcgtctgaaaaaggctttctgcaagatgtgcgtcacaatttgtgggatattttgcccggatgagggcgccgtagcgggctacggcaactgaattcgggtgaaatatcccgcaaagtggggcgtgcagattgcgggaatgatttttcagacacgctctagatctcaatcatcacaagagaaaggaaataaataaccggtgctgtgaagatcacactgtcgaatctgtcaaggattcctccatgtcccggaattaattttccataatctttaatcccctgatttctcttgatcgcagatgcagccagatcgcctaccatggagatcagcgctccgattgcacagatcacagcatattccagcatcggtccctgagtggctgctgcatagatcacaccaagaagtgcagctcctgccacaccacccacagctccctccacagatttcttagggctgaggacaggtgccattttatgtttaccgatcagcattcccacacaatatgcgcaggtatcacatccccatgagcacagaaagatcagccatacgtggaactttccaccgggaagctctctggtaagataaataaacgacagcataactgccacatacacaataccaaacagtgcaggcattacctgccctgcctcataggttggataagtgaacacgtatacaaacatgagcagcacaagtccgaaaatgattgccagcactccatacctctcaaaatcaagcagtactgccagataatataatactgcgcctaaatagcctgctgctgccagcagatttatcttctcatcctgcaccttcattgctctgtacaattctctcattccaatgagagaaaccgcaagaagtgtgaaaaacagcacataatcaccgctgatgatagtagcaagcgcaataatcacaagcaggattccgcttaagagtcttgtcttaaacattctttactcctccttaactccgccgtatcttctgtctctctgattatatttctcaatagccttaatcaactctgctttattaaaatccggccatgccacatctgtgaaataaaattctgtataagccatctgccataacagaaaattggaaagtctcaattcaccgcttgtgcggatcatcagatccggatcagggattcctgccgtatccaggtaattgtcaaaaacatgctcatcaatttcttccggctttacttttccatctgcagcatcctgagcaagtttgcggatacctcttatgatctcatctctgctgccgtagtttaatgcaatctggaaatagatttcatcatatttctgagaatattgttccagacgtgcaatactttcctgaatatcctgatcaaatgccgaaacctctccgatcacccggacacgcattttgttcttatctgccagtttaatacattttttcagataacttcggaacagtttcatcagaccgtccacctcatctttggaacgtttccagttctctgtggaaaaagcatatacagtcacatatttaactcccagctccttcatatagtcacagactgtttccagatttgcacagcccttcacatgtccgtagcttctgggcattccctttgccttcgcccagcgtccattaccatccagaataatggcaatatgatttggtacattcatactcttgtttccttttcttatcctgttattcctttaaccttactgtctcatcataatgaaccgcagtttccggtccattatctcattcagataaaaagagagcccgcattcatggagctctccttttcgtttcccttatacggtcatgatttctttgctctttgcatccactgccgcatcaacttctttgatatatttatctgtgctcttctggattttctcctcaagttctttgatctcatcctcagatacatcctgttttgcaagtttcttaaatgcatcatttgcatcacgacgaatgttgcggactgctactttggctgcttcgccttttttcttgacatctttaaccagttccttacggcgttcctctgtaagttccgggaatacaaggcggattactttaccatcgttgcttggatttaatccaaggtcagaggtaaggattgctttctcaattcctttgatcaggctgctttcccatggctggatctggatcatacgagcttccgggacagtgatatttgccacctgctgaagaggtgtcggagctccgtaataatctacggcgagtttgtcaaggatatgcgggttcgcacgtcctgcacgaattgtaaccagttcgctctcaaggcttgccaatgtctttttcatcttctcttcatatttctgaattctctcatccattaggttcgtctccctctttttatagtttttatattacactttctctgtaaactgacttataagccttacttatacagtaaccttagttccgacaaatttgccatgtactgcattgatgatgctgtctttttcatccagtgcaaataccagcatcggcatcttctgttccatacacatgatcgatgctgtcagatccatagctgccagtttctttgcaactacttcttcaatggaaatttcatcatattttactgcattcgggtttgtcttcggatcactgtcataaattccgtcaacagcttttgcaagaaggattgcttctgcttcgatttctactgcgcgaagtacagtggctgtatctgtggagaagtaaggatgtcctgtaccgcctgcaaagaatacgatcttgccctgtgcaaagcttgcttccactgcatccttagagtaaaggcttgtaaatgcaccgcatacaaatggtgtaaagatttctgtctttaatccaaggtatctgcagatatcagatacataaatacagttcataactgttgcaagcataccaatctgatcagccttattcctgtcgatagtctcactggtgcgtcctctccagaaattacctccgccgatcacgatgccgatttccagtccttcctcagcaattgtcctgatctgctttgcaacttcaataacagtcgcctcgtcaaatccggtcttcttctcaccggcaagggcttcaccgcttaattttaataatacacgtttcatagtaactgtctcctgaaattaattttatcgcaggtaacagaggatcggaatacctcctctgttacattcgtagttctattctaccatattccggcaacaatttcattaccattttcatcaactgttgtagaaactgtgaaattgctgtaataatggaatcctgttttacctgtctcaggatcatcctcatagctgctgccctgtggagaaccgcatgcgccttccagtgcatccagagactgaccgatatactgttctgctgtggaaatcatatcgccgccatttcccggatcatcgttactgcccggatcatcattagtacccggatcgtctgagtttcccccattgcccggatcatctgaactatccccggttccattgccactgttattattctgatcagaactgttgttactatctgtggaatcagaatcatctgcagaattcttatcactgtcgtctgtggaatctgattcagactcactgtcatctgtaattccaagacgttcctttaccgcatcaagcgtggatacttcttttgttgatgtacctgtcagatattttgcatatgggatcgcatcatcatctgtgccatccatacataacgtaatctgcgaaattgttccaagcggaatatcgcggaaaaagcattcattcgtgtcctcatcagtatatgcaatacggatatcataggaagctgtactcttgttggatgttgtctgcgtatctgatgtctgtgtatctgatgtctgtgtacctgatgtctgtgtatctgatgtctgtgtacctgatgtctgtgtacctgatgtctgtgtatttgcagtctgcatataatatagtgccttgtccttatctgtcagggtaaacattccattgatgagatcatctccccatcctccatcctcgtctgcatcataatcctcactgtcttcatccacatgagtccggatatagagtgactggatgtcatcccctgtattatttacaaacacaatcttagatgctgtggaagttttctcccccattacattctttatgtcttcatctgctgtctgctgcatatccaccatatcgactgccttggttacttcaggagtcggggtagctgttacctctacaggtgctgtctctgttgtctttttcttaccacatccggcagctgccactgtcattaccaacagacctgccagtattaaataacgtttcttcataatatattccctcctgctatatggaatatcttttttctttttaacaatgtcattttttcaattccctattattgcagagtatcgaaaacttgtcaactaagcctctgccgatttcatacaattttaagactttcagatttttaaaatctctgcctgcggacgcattcttatgaaaaaatcacatttttcctacttcatattattgcacaaaaggaaacgctcactgtaatcagcggatactcaccagaaaggatgttactgtgactttcactcgcaaaaaacacctcgcggaatattaccagtgaacagtaacgaaaggactaccatgttgctctggcagtcctttctcatctctttgtggtcatatttaatatatttctattctgccagcttcatcagaagttccacgcattcttcctctgataaaaccgaagtattcaggcagatatcataattttccatttttccccattcatgtcctgtataaaagttataataatctcttctctgacggtctttatatgcaatcctgtcaagtgcttcctcctgagaaatatgcttatttttcttaatccgtttaatacggtcttccatatcagatgcataaatatacacgcgaagcagctgattatcatccttcagaatctggtctgcacatcttcccacaaaaatgcatggaccttcctgtgccaggcgcttcactgtctctttctgcgcatgaaacatcttctccggaatcgtcaggcgttttttatcctgcgattcttctgacatcattactccgattgcataaagaagactggtcttgcctttaaattcattgatgatttcctgactgattccatgcctctctgcttccttcggcaaaaatttactgtcgtaacagggaactcccattttttctgaaagcaaagctgcaatatatcttccaccgcttccatactgtctgctgatcgtgattgttttcatagggcaccactcctttcagctcatctgcctgaaaatgaattgttatttttttatctatatgatagattataagaattttcgaatatttttgcaatatccattaattttttcataacatttcacaattttgagccaaaggatttagtaatattatcaatatagattcttaaccttaaattcacgctctgcttctcttctctggtctttctttgcgatatcctgtctcttgtcataaagtttcttgcctcgagccattccaatttccacttttaccagactgtctttgaaataaactttcagaggtactaaagttaaccctttttctttgagctttgcttcaatcttattgatctcatatctgtgaagcagaagcttacggattctcaacgggtctttgttgaaaatattgcctttttcataagggctgatatgcattccgtagatgtaaacctctccgttctctacacggataaaggattccttgatgctgcatttgcccatacgcagggattttacttctgttcctgcaagggcaataccggcttcataagtatcttctataaaataatcatgaaatgcctttttattattggcaatcagcttcattccttttttctttgccataatatcctccaagccatttttatttaattctcttcttcatcattccagatatcagcaaccagctcaaaatctactgttttgagcattttatctgcatctgccacacggacacagactttatctcccaatttgtagactttctttgtcatctctccgcggagttcgtaggtttcctggtcgaagatatagtagtcatcccgcagagtgttgacatgtaccagaccttctactgtatttgggagttctacgtaaagcccccatccggtaacgcctgagataattccctcgaattcctctcccagatggtaggacatatattctgctttcttcagcttgtctgattcacgttctgcctcatctgcacggcgttcacatacactggactgtctcgcaacttcatcaaggatttcagcatagtgttcggttctgccttcacgcatcagtctgcctcgtaagttatccttaatgatcctgtggatctgcagatcagggtatcttctgatcggagatgtaaaatggcagtaatattttgctgccagtccaaagtgaccgctgcattctgttgtatatttcgcctgtttcatggaacgcagcaccagacggctgatcattgcttcattcggaagcccttcgatactttcgatgatttgctgaatttcttttggagtgatctcttcttttgctttctgaatcttcacaccctgattgtgaagtaatgtcagaagactctccactttctccggatccggattatcatgggttctgtatacaaacggaatctcttctgtgcagtattcctgtgccacagtctcatttgccatcagcatgaaatcttcaatgattttggttgccacatttgcttcatatggcttaacatcgattgcttttcctgctgcattaagaataatcttgctctccggaaaatcaaagtcaatggaacccctgtgatgacggctgtttcgtaagattccggacagttctttcatcataaagaacatcgggataagtgcctcataccgtttctttgcttcttcgtctgtgtcctcaagaatattctttacatcagtatagcacattctctcatttacgttaatcactgtttccgcgatctgatgggaaactaccttacccttttcgttaatgtccatcaggcagctcaacgccagtctgtcctctccctgattcagagaacagattccattggaaagacgttccggcaacattggcacaacgcggtctgccagataaacactggttccacgtttcagtgcttccctgtccagagcactgttgtactgtacatagttgcttacatctgcgatatggactcccagatggtaaatgtccccctcttttgtcagggaaatcgcatcatccaggtctttggcatcttcgccatcaatagtgactgtctgcagatgtctcagatccagtcttccatctctgtctgcatccagcacatgatccggaacacgctgagcctgcttcattactttctcaggaaattcacttgggattccgaagctcttgacgattgccaggatatctgtacccggtgttcggatatttcccagattctccttaatttttccttcaggattcttatttccggagccataatctgtaatcaccacgattactttatcaccattttttattcctgccgcttcttttctcggaatgaagatatctttggaaaatttcggattatcactgatcacaaaaccgaaatcccgatttaactgataagttcctacaatttcaggcataccacgctccagaaccttcacaactacgccttcctggcgttttccctcttttttgtcatttctgatgatgatccttactttatcctgatgcatagctgttcctgtatcactttcaggaataaagatatcctcatcctgcccttcaatttctacgaagccgaaacctttgggatgtccgatgaaggttccctcagcctggattccctccggctgctcttttttatttttatcttttttatttttatctttcttctttctgccatactctgatccgtattcttctcttcggtcatcgtaataacggtcatcttttttctttttccattttcctttgaccttttcatatctgcccttgcggtctacagatacctttccttcctcgcaaagttcgtccagaacatcatacagctctcttttctcttcttttgaaagtctcagaagagaagaaatctcgcggagtctcattggctgataaataggatctcccatcagttccaggataaacttttttcttctgtccatatcttttttactcatattactcctcacagcctccgcagaggacttttatctgattcagctctttatgacacaaaaaacactcttgcacataacaagagtgtttcaaatttcttttctgattaaccaagcatatttaatgctacagaaattacaaaaaataaaattcccataatagtggttgccttaacaagtccgccctccatggaacgacctttgttcttaccccagtatgtttctgctgctccggcgatagcaccaagtccctgctgcttaccttcctgcataagaactactactgtaagagcgatgcaatctattatgaaaatgacactcagaatgatcttaataatctgcacttcgttacacctcctaatcaactgagtttcattgtaacatagccggatggggatttcaaccacaattcagagtttttgtcaggtttcttaacaatttttttcattttctttaaaaggattttcatacactgccagttctcccaatgcctcatggatacgaagaagctgattatatttggcatttcggtccgaacggcagggtgcacctgtcttaatctggccggcacctgtggcaactgccagatctgcgataaatgaatcttccgattctcctgatctgtgagaaattactgtcctgtatcccgctttctgtgccatttccactgcatccaatgcttctgaaagtgttcctatctggtttaattttatcagaatggcatttgccgctcccagtttgataccacatgcaagacgtttgatattcgtgacaaacagatcatcacctacgagctgtattttgtctcccagtctttttgtcatctgtttccagccttcccagtcatcttcctcaagtccatcttcaatggaaacaatcgggaacttctctgcaagtttttcataatattctatcatctcgccggaatccctgagaacttcttcccctttcatttttccttctctggggaaaacataaacgcctctttcttcatcgtacagttcacttgccgcagcatcaattgcaatgctgatatcctttccgggttcataccctgccttttttactgcttccagaatcacttccaggacgctttctgaatcggaaagatccggtgcgaaacctccctcatctccgactgctgttgacagacctttttgtttcaggataattctgagaaactggtatacttccgcacacattcgaatcgcctgctccatattttccgctcccgtcggcataatcatgaattcctgtaaatccaccgtattgtcagcgtgacgtcccccatttaagatattcatcatcggtacaggcatctgtctggtatggcagccgccaagatactgatataaaggaacgcgaagagctgctgctgccgcccttgctactgccagggatactcccagtgccgcatttgcccctacattacttttattgtctgtgccgtctgtttctatgatttttttatcaatataggactgatccagagcattttctccaagaattgcttctgccagctttgtatttacattctccactgctttgcggacaccaagtccggtgtagcaacctttttctccgtcacgaagctccactgcctcgaactttcctgtagaagctcccgaagggacgattgcccttcccgtatatccatttatcccgatcacaccttctcctactgttacttctacttccactgtaggatttcctctggaatcaagtacctgtcttgcatgaacccttcttacaggcagataacgtaacatattagaacctcctgatcattttaataaaccgataactgttccatattttcacagttaaacctcaagtacagcgtttcgtaaataactataccaatcgcgtaggatgcggattcgagtgtgctggtataaaaacgcaggcgtagcgggctacgctgaggcttttagacctgtgcaatcggattcgcagacaagtgagtggtatagttatttcgaaaacgatgtactagtcaaaatacgtcactgagaacggcgtgaacagtaacgtaatttgacttgtatatctttacaaccatatttttacccaatatggttccggctatgcattgtctatatccattattattttcagaatattttatcaatacaaataattttaatattatcttttaaatatttttgtaaattttctattttcattcttgacatttcattctttatctgttatattaagttcataaaacaaaagggattacgaaaaacaaaaaagtaaaggagtgagaccaccgaaaacataatcttttcttcataatttaagaaagcgaggtacagaccaccagaatagcaaagtttcaaattcatgacttataagaaaggcaggtacggaccaccaagaacttaagcttttaaatccaactaagttttataagtagttcctatcaaacaaggaaggtacagtccaatggaaacctaacgatttatcttattttgaacgtaacagttaaacattctaaagaaggtacggtccaatggaaatttaatgatttactttatttttaaagtgacattcaatcaaaataaggaaggtacagtccaatgaaacgttaacgatttaccctattataaaacgtaaccgttcatttacatgaagaaggtacagtccaatgaaaacttaacgatttaccctatgaaactataaaaggaaggtacagaccaatgggacagtaagttgaaccgttaatttcataattcaaattcatacaatttcataatttattttacagaaagtgaggtatcatcccttggatacagaatcttaacaggagccacgatgaaatataaatctgtggctcttttatttgtcattcagcttctatagttcccctctttctcatatattaaactaatatcattccattctgaggttaacactctctatgcatctcaaatacatatcttccactcggattttctcttccagatttaccaagatttttcttcttttctgtgcttgtgcatttataggttcctctataggaaaaatcgtatcgcacaacactgccagacagactgctgcttctgcccaaagttccaactggggactcagttttcaggaagaaggcaaacgtcctgttggaaatgcaacgatagaagaattggctcagtacaatgccttttttgctgaagataccgaagaaaagaaaatctatctcacctttgacgcaggctttgaaaatggaaatactcctgctattttggatgcactgaaaaaacatcaggcacctgctacattttttgtggttggaaatttcatttcggaaaacaaagatctgatcaaacgaatggaaacggaagggcatattgtcggcaatcatactatgacgcacccggatatgtcaaaaatttccacaaaagaatcttttcagaaagaattatccgatgtagaaaaaatttacagggaaattacaggaaaagaaatgacaaaattttaccgccccccacagggcatctacagtacacagaatctgtctatggccagagaactgggatatcacacatttttctggagccttgcctatgtagactggtaccaggataaccagccagatccacaggaagctattgcaaaactgacgaaacggattcatccgggagctattgtactgctacacagcacctcttccactaatgcacagattctggatgaactgttggataaatgggaagagatgggatattcctttcattctctgaatgaattatgatcatttaacattttccgatactgttcacacaccactatcccgcgaggtgttttggcatgaatatgccaaaatcccgagacatacaagccaaaattccattgccgcaggcaatctggaatgaattttggctacgttactgtgaacggagtgaacagtaaccattttcccatttacaaagtcacatacaaaaatgacagaattttgaaatatctgacacacttgcaataaacaaaaattgatcattatctcaaaatgaaacgcactccacaggaatgtcctaatggagtgcgtctcactttgtttataaatcaatactttagagaatatcaaaattataacttttatactgcatttacactgcttattcagcgtctgctgcctctgtctcttccggttcttctgttgtttccgcttctttagtgtcatcggaggctgcatcagaatcttctgtctctgctgcatctgcatcctcagctttctcttcgctgtccacaacaccaccttcaactaccaggtcatccggattgatgttgtcaccgtatacaggtttcagagtttcttcgaaatctttatggaagaactgttcatctgccagagatttaatctcatcgttgattgcgttcagaaggtctgtgttacccttctgtactgctggtgcaatcgtatcaatatcaccaagagattcgattcctacagagaatccttcattctgctgagcccatgcaagtacttctgtattgtctgtggagaatgcatctcctcttccatcaagaagcgcatcgtatgcttcctggtattcatcaaattttacaagttcaatatccggatagttatctgtgaaatatgtctctgctgttgttccttttacaacgatcagcttcttgccttccagatcttttacatctttgatcagcgcatcatcaggagaaacaactccaagagctaccttcatatatggaagtgcgaagtctactttctccgctctgtcatcggttactgtaaagtttgcaaggatcacatctacttttgcagactgcagatattctacacgacttgcagcctctacataagtaaattctgcatcgtcttcacttcccagaaggtcttttgcaagtctttttccaaaataaatatcgtatccctgaacatcaccgttttcatctacatatccaaatggattcttgtcactgaatacaccgattttgatctttccgtcttttttgatctcatccagagtacgggcctgtgcagtgtttccaccgtcatctgccgcacttacaagaatacttccgccaagaagtgttgttgctgctacacctgttgctaataagactgctaatatttttttcttcatgttcttttcctccatgttttaaaaaattttgattttattataatttttataactagtacatcgttttcgaaataactataccactcacttgtctgcgaatccgattgcacaggtctaaaagcctcagcgtagcccgctacgcctgcgtttttataccagcacactcgaatccgcatcctacgcgattggtataattatttacgaaacgatgtactagctcttatgatatcctgctatttcatggatattatcatccatttcaggatttataaaatattctgttttcctctattctattttttcactgtttcataatggaaactgttcaggaactgttttgccctgtcagtctccggattatcaaagaactgtttcggagtgttctcttctacaatgtttcccttatccataaagatcactctgtctgctacggaacgggcaaattccatctcatgagtgacgatcagcatggtcattcctgtctttgcaagttccagtactacctgaagtacttctcttaccatctcaggatcaagtgctgctgtaatctcatccagaagcatgatctccggatgcatcagcatggcacgtacaatggcaactcgctgtttctgaccaccggaaagctgccttggataattatctttcttatccagaagaccaactctgtcaagaagctgctccgcttcctttttcacttcttctttatttcttttctgtactttcattggtgccagaagaagattatttaaaattgtcatattcgggaaaagatcatagctctggaaaaccattcctatcttctctctgactttgcttatattctttttttctttctcatagcttacaccgttaagcttcagtacaccggtgtcaatctcttccaggcggttgatacatcgcaggaaggtactttttccacatccggaaggtcctacgatcaccaccacttctcccttttgcagagagaaggaaacatcatccagaataggaacattgtttacatatgatttctttaaatgttctacttctaaaatcagctgtcccattcatttatcctcatttctctattaatcagcaaacttcttttccagtactctggagagtctggaaaatggaaaacatatgataaaatacataaagaatactgcaccgtatacccagagggccgctgtcggatttgtataacgtgatgcatctatgatctgttttccaacttttaacacctctactactccgataagagctaccagtgatgtggtcttgatcattcgggtaagaagattcactgcggatggaagaagtcttcttatagtctgcggaaggataatataaagatagacctgccatttgtttaatccaagaccgtatccgctgtcatactggtgtttaggaatggagatcagcgcacttcgcaccagatcacccatttcagcagttccccagaatgtaaatacaatgaccgccgctgtctcaccggaaagattcatccccagatgcttggccgctccgaaatataccaggaacaaaagcaccagctgcggcatgattcttactatttcaaggtaaatgcggcagataaacttaatgattttatttgggatattcattaccatcccaagaagaaatccaaggattatggaaaataccatggaaatcagtgcaattcttattgttacccacaagccctgccagagtcttaatgagttgattcccttaaaaagaacctcaatccccatattctgcatagcggactctcctttctacaaatgaacagataagtgagattggtaaaagtatgatcagatatgcgattaccaacataaacagggcttcatctgttttgtaataaattccgatcaggtcttttgtcacaaacatcaggtctgcaagtgctactgcactgaatacggaggtttccttaataagaaagatcgcatttgcacagaatgccggaatagaattggatactgcctggggcaggataatgtttgtaaatacctgactcttactcattccaaggcttaatgcggattccacctgaatgggcggaacattgtccaggccgcttcggaaggcttctgccatataactgcctccgagaaaggtcagtcctgtgatcgcacactgttctgaactgaggacaatccctattttcggaagaccgaaatacaggaaaaacaactgaatcaacaatggtgtatttctggacagttcaatgtaacattccacgatctgacgaagtacaggaatcctgaaatacttaatcatgctgcagacaagcccaaccacaatggcaagcaacacaccaatcaccgccatgtgaagtgtaagctttgctgcctcaatataaagaggtgtctgctcgcggataaactcaaaatccatggttactttattctccttctattattatgatttagagcatatttgaaaaacgctctggtgtgcctgttccacttattacttttcaatccactgctatttcggttaaagcaggtagtttacttgatttagttaaagcgttacatctgcacatctgtgaactatcataacatttcaggcttcatcctgcaagcttttcataaattgcatctgcaagtctgctatgtcccagttcatccagatgctcctgatcggcttctcccggtcgggcaaattctgaagccggaagataagaaatatttcttcttctggcgattttctcatacacccggggcagattccatgatacttcgatagaattcttatcgaattccggatcaaaatcctcttcccagattctctccccaaggtagattggagataccagtaatattttggcatccgggtttacagtgttgatctgatcaaggagctgttcaatcccctgtccgattacttccggggttgcgctgtatacgcttttacaatcgttcgtgccaagcatgagaacgatagtgtctactggtctgtggctctcaaggattgccggaagcatttctgttcctcttctttctgtacggaatggatcatcgaatacggtggttcttccgcaaagtccttcttcgattactctgtagccttttgttcttactttgtcatccaggatgctggtccagcgggtaccccatccgtatctctgattagtagttcccgggattaaaccgtatgtattggaatcaccgaaacataagatttgtttcatgtcttgtcaccttcttatctgatatttttaatgggatttttgttttccctgttttcatattgatttgataggaatactatacaatctttatttttgtttgtcaagcccttttttgtattttttgaaaatgtttatttgtacgtcataagtcataaagggacgctcagaaatatttttattttccgtgcggtttcgggacctatagcaatcctcgtaaataatcaaaaaatttttgataccgatattatttccagtcctgaactttatattttttatattttgcaggtgtcgtgcctgtatattttctgaagatttttataaaatagctctgtgtggaaaagcaaagatattcactgatctgtgctgctgtataatctgaataggtcagcatattacaggcagcttctatccgttctttctgaatatagtcgacaaaaagcattcctgtttcttttttaaacaatctggaaagataactggcactgatccctgctgcctctgcagtttcttccagtgtaacgggaacatgcagatgaagatgaatatattttactgccgcttcaatttctctgctgtaatgttgcatcccggacttctgcacttcctgggcaaatctcagggctgctttttgtgataacttttctatggaagatttgctggtgcactcttctactgtctaaatataaccgtcgcttaatgcataagcagtttcttcaggtacaccaccttcaatagcagctctggtaaacagcgtaattcctgcgataaacatatttttactgtttctcagttcatttctggacaggattcccggggttccatccggtgtgagctgaaaaacagactgtattctgtctgtctgaccattcctgatagcatcatactgccgacgctcacttgcataagattcatgtttctgtaaattttcacgtctctcaaatagagtattcctgcttcggttctctgcaacctgttgttctttttcattgtattccttacttttctcctgcatctttattcctctcgcatacgcagcaatattttgttatttatatcaatattttactatattttatcatttacaggtgatatagtccagataaaggcaacacaaacaatctgtttgttactgttcactcccaatgtcattaacttaagagattgttgcttgttaaacgggcaatgctctctctgatacctgcttgatatttcctaaaatattacttgacaaatactcctcaatatgcggcgttattactgatcaatcagtaataacgccctttgattaggcactgttatttttaattacttaatcaaaggagtatttatttatgaactattcagattctatcaaagctattttacttgctgctatcaatgatctttccaaaacaccggaaaaatatgctgtcaaacccggagttgattttatcagaaacagaaaacttggttttaaagattatatgctgatgtttctgactatggaagctgactgtatcagggaagaactgtaccgttttttcggacgtactatcgatgcaccttccaaagcggctttttacagacagcgtaaaaagatcagggaagatgcttttcggaatcttcttcttgcttttaacaggaaacttcctaaaaaactatataacggtaaatatgaattctgggcctgcgatggttcttcctgtgatattttccttaaccctgaagataaggatacctattttgaaccaaatggtaaatctaccagaggatttaaccagatccatatcaatgctatgttttctttacttgataagcgttttactgatattttagtccagcctgcccgaaagcgaaatgagtattctgctttttgttccatggttgattctgcagatatccatgaacactccaaagtcattttctttggggacagaggttatacttcttacaacaactttgcccatgtgattgaaaaggggcagtacttccttatccgatgtaacgataaaagagcttccggaatgatgggatatccggttgataccctgccagcttttgatgaagatatctctcttatactgacgaggtctaaagctgtaagcaaatattccagacctgaactattctcttcataccgatacatttatcagaatgctccgatggattatctcaatgatcaaagaacggaatatgaccttgctttacgtttgttacgcgtacagcttgatgatggctcttatgaaaacattgctacgaatcttccagaagaagagtttaaagctgaagatttcaaagctctttatcatctgagatggcaggaggaaaactctttccgagatttaaaatattccctgtgtctgaaagcgtttcactcaaaaaaatatgattatattgtgcaggaagtatgggcaagagttattctatataatttcagttccagcataatcataaatgtaactattgatcgggaagatcgtgcttatgaatatcaggcgaattattcatccgcgcttaaaacatgcagggattttttaaggattcacgatgggataacaaagataaatgtagaaggtctgatcgctcaaaatattgagccgatcagacctggaagaacctttgcccgccagcataggtttaaactcccgatgagtttttgttatagacattagcattaactcatatattactatatttcatctttagacaaatttcaatgttaaatattgattttgtctttttgttatacccaaatttcagtaaaacattgtatcttaatccctcaatatccccttttttatcataatcaaatccttctgctgatattttcatcaatgcagtattagcaaattgcttaagttaatgacattggttcactccgttcacagtaacgtagccaaaattcattccagattgcctgcggcaatggaattttggcttgtatgtctcgggattttggcatattcatgccaaaacacctcgcgggatagtggtgtgtgaacagtaacatctgtttcacatataaataaacttatggaggaatttattatgcatcgtgatttaaagaaaatcatcagccagatgactctggaagaaaaagcaggcatgtgctcagggcttgatttctggcatctgaaaagcgtggaaagacttggaatcccggaggtaatggtaagcgacggtcctcacgggcttcgtaaacaggatgacaagggagatcatcttggaatgaacgacagtatcaaagcagtctgcttccctcctgctgctttaagtgcctgctcttttgaccgtgaattaatggaatccatgggcgagactattggcagagaagctcaggcaaatgacgtatctgttgttttaggaccggctgtcaatattaaacgttctccgctctgcggaagaaacttcgaatactattcagaagatccataccttgctggtgaagttgctgctgcatttatcaatggtgtacagtcccagcatgtaggaacttccatcaagcattttgcagctaacaatcaggaatatcaccgcatgagcaattcttctgaagcagatgaaagaacactccgcgaaatttattttcctgcatttgaaactgcagtaaaaaaggctcagccatatacatttatgtgctcctacaatcagatcaacggtacttttgcttccgagaataaatggcttcttaccgatgttctccgcaatgactggggctttgaaggatatgttatgtctgactggggtgctgtcaatgaccgtgtgaagggtctggaggccggcctggatctggaaatgccaggttccaacggaacaaacgatgctctgatcatggaagccgtaaaaaatggcactctgaaggaagaagttctggatcaggctgtagaacgtatcctgaatattatttacaaatatgcggaccaccgtgcaccgcaggaatttaccatggaaaaagaccatgaagaggcacgccgtattgcggaagaatctatggtccttctgaaaaacgcagaccagattctgcctctgaagacctctgagaaagtaacttttgtaggtggttttgccaaaaaacctcgtttccagggcggcggaagctctcatattaactgctttaaaattaccaatgcactggaagctgttcctgctgatgcacaggttatttacgcagaaggatttcctgctgataaagatttatacgatgaaaaactggcttctgaagcacttcaggctgcaaaagctgctgataaggttgtgatcttcgccggacttccggatagttttgagtctgaaggatatgaccgttctcatatgagactgccagaatgccagaaccgtcttattgctgagatccttgaagttcagccaaatactgtgatcgttcttcacaatggttctcctgtggaaatgccatggatcaataatgtgaaaggtattctggaagcttaccttggcggacaggcaggcggagctgctgtttcaaatatcctctatggtattgtaaatccaagcggtaaactggccgagacaatcccgatgaaactggctgacaatccatcctacctgaacttcggtggcggcgataaagtggaataccgtgaaggtgtatttgtaggatatcgttattatgacaccaaacagatggaagttgcctatccattcggatacggactctcctatactacttttacatacagcaatctgcagatttccaacacaaatccaacagaaaaagatactgtcactgtttctgtagatgtaacaaatacaggaaacgttgcaggaaaagaagctgtccagctttatgtgaaagacatgacagcatccacgatccgtccggaaaaagaactgaaaggttttgaaaaagtccagcttgctcctggcgaaaccaaaacagttactatggaactggataagcgcagctttgcatggtacaataccgaattacacgactggtatgctgcaagcggcaaatatgagattctgatcggtgcatcctccagagatatccatctctctgaaaccattgaactctccagcagccaggtaattcccatgcatattcatatgaacacaacactgggtgagcttttcaataatcccaacacaaaagaagcagcaaaagaactgacttccagatatctggctgcaatgaacggcggttcagacacagcttcccaatctgctgctgaagctatcactgaagaaatggtagcagcaatgacagattccatgccgcttcgctctctgtgcagctttggcggattctcccgggctgagatccaggagatgattgacaaactgcaggcaatctatagcaatcctctgaaataatgcatcttaatccagcccatcagagtgtgaaatcctgcgtcagatatctttgccgtgcgtcagcacgcctgcagatatcttccttgtctttcgcactctgctaaactgtcttaaatgcattatttacgaggattgctataaaacaaaaaaactactgtatataagctgaatttttttccggctttatacagtagtttttatttatttctctctaaaccattccttcatcacatcaaaaatttttataagctcttcgtcactgatcacatatggaaccatagagtacatgtagttcaaaaatggcctgctgaacacaccccgttcataagcaaactgctggaagccttccagattcctggaatcatgaacctccacgcacacgcagccacccatgatccggacttctttgatccgtggatctgtgaatgcttccatctcacgacgtgaaacctgttcaatatgacggattttactcatataatcttcacgctcaaaaatctcaatccccttcaaagccacagcacatgccagcgggtttcccataaaagtaggaccatgcatcagggcaagtctgtcatcatcactgtaaaaggcatcaaataccttgtgatttgccacagtgacagcatgaccaatatatcctcctgtaagggcctttccaagaaccaggatatccggcagaacaagatctgccacaaagcgattacctgtgcggccaaacccggttgcaacctcgtcaaaaatcaaaagaacatcatactggtcacacaattctcttgctctcttcaggaatgaaatatcatacatccgcattcctcctgctccctgtaaaagaggctccacaataaagcagttcagacggtcatgatactgttcaaatgcctcctccagggccgggatctcagtgggaatatggacaacaccctcttttttgtcaaaagcgaaatgataatcctcgtcatcaccaacttccattgccttaaatgtatccccgtgatatgcatgttcaagagccagcactaacgggcgctttcttccctgattggtgttgtattgaagggccattttaagtgagacctccactgcaacacttcctgaatctgaaaaaaaacaataatccagatctcctggcagaaattcctgcagcttcgcagaaagcttttccaccggctcatgtgtcagtcccccaagcattacatgacaaaaacggtctgcctgttccttgatcgcttctgtcagttccggatgcttatatccatgaatcatacaccaccaggaagatatagagtctatcagcttctgatcttttgtataaagatgtacaccctctgcatccagaatcttatagggagctttcattgttttcatttgttcatagggataccatatcatttgatcttcacctcatcataaaattctgccagtacatctgcatctatatcaagatccttcgcattatcctgtacttttgcaataaccggaaggcctgtcatatattggcacatagcaatattatcctcttccataatatttccgggatggtaatggttaaaaataatacctttgattggaagggaatggactttcatatactcagcagtcaatacaacactgtttattgtaccaagccctgcatctgccaccagaatactggaaagctcaaactctcttatcacatcttcaagctggattttgcgttcatcaaaacagagcggacagaggataccgccacttccttccatggtaatatattcataatcatttgctgccttcaaaaatcctcttcgcacaacatcaagatccaccggattaccctcaactcttgaagcaagatgaggagaccaggcattttcatatacataaggacacatatcatccagagactgggaaataccagacatctctttaacaaaaagtgcatcgcccgggattagacttccgtctgcacgccggtcatttccactcattgcagctttgtaataagccggattttttcctgcctgtgccagtttttttacgatcagtcctgagagataggttttgcccatgtctgttcctgttcctgtaataaataccgctttactcatgattcttccacttccttccaatattctggtgttacatttctgcccatatcagagagcatttttcggtcgctgcggatggttgcgcaggcaacagtagtcagcatattccctgttattgtagcggaggcaccggatttaaaagcggtttccccgtcattggtaagaagtgcccgtccggcagcaagacgaatattagcctcaggattaatataacgaaagaaggcaattgtccggaggatatcctgctctgaaagctgatcaagatgttccaaaggtgttcccggaatgggcatcaatgcattgatcggaatggagtcaatacccagctctgcaaggctgactgccatatccagacgatcctcccaggtctctcccattcctatgatgccaccggaacatgcacacattccttctgcctttacctttttcagagtttcaatcttcatatcgtatgtatgtgtcgtacatatattaggaaaatttctccgcgaagtctcaatattatgatggtaactggttactccggcttcatgaagacgatgcagctgttcggaagaaagaaatcccatggaagcacagagatcgatattgcattccttatacatggtttcataggcatgaatcgcctgatcaaattcttttccggtcagagcctttcctgcagtgacaatggaaaaacgatcaacaccctcctcttcattcattttacatgcttccagaatcttttcctcgggaagaaaatcatagatctcacaggaagtatggtggtgtactgactgagcacaatatttgcagtcctccggacacctgccgctgcggccattgataatggaacagagatctaccttatcaccgatatatgcttcgcggatacggtctgctccttcacataattcatctaaatcacaggtaagaaaaaaagaaagatcatcttcccttgtaattctgcgtccatcaataatttcctgtgctaaaataagtggattcattttacaagctcctccctttccagtctgacatttgattttgaatcaaaaagatattgaagcactaccggtctgacacgttttgcaataacagctcccagaacacttaatgcaatgtcaccgggtacagcaagaagaaaacaataaagaatcagcggccagattccaatcggtgtatcgatcacataattacagatcacatagtaataaaccattccacaggcatagacgatcatcagacctgccaaattcgcaagtaaatagtgaaaaactgtcttctgcttaagacgctctgcaataagtccggtcacgtatgttcccaggcagaaccctataatataaccgaagcttggcttgaaaatataccagatcccaccgccctccgaaaagatcggaagtcctgccagtcccaacagcatataggcaaccacagaaatcataccccttctggatcccagaaacaatccggcaagcatagtgaacaggtactgcagtgtaaagggaactacaggtacagggattttaataaacgcacctgctgcaatcaacgccgtaaaaagaccgcaatagatcatgctttttgttttagtcatttgtaaacctccatatattttatggtttactattttaaagcacagaaggttaattgtcaacttttttattttctcagtttacagttcgccttgctatttgcgtcacagcatatataatatggtcaagcggataaaatcatccgcttcggtacttgcttgattcggtaatcacgaccaccggctaagccggtggtttgctttgaccctataagggtctattaccggcactggagtctaaagactcattattcctgtattttttgcatttttccataccgtatctacataatatccacgacaccagaaatgtctgtttccatatttgtacttcagatttgcatgtctttcgaatatcattaatgtactttttcattttaaccatacaaaaacggcagaccccccaataaagtcaagggattctgccattttatttttcatcaactgtcgaaaacgggtgtgtgtcatttcatcgggaatttctttcttgccaggtcagttctgctttttccttacagttctcagaaaataacagatcgaccacgcaatactcattcctgctgcaattccaaaagcaaaaagaaacgtatcccgtccatattccaatgctcgaacagtatttccttccacaatgctgttcatacaataataaagagtacttccgggaatcagagggattacggaagtaacaaaaaaagatgtagatgtttctttacagattcttgcaagaatttctgcatacacatctgtaacaaagccagccatcagagtcggaagaaaaacatttccccagaattcttttcccagaaggaacaccagccagctaaggaagccgccaactgctgccagaggcaaatatttcttttttatatgaaaaagaattccaaatcctacagagccaatggctccggtaattaattgtatcatgattgctgcagtcaaagtccaaacctcccaaataaaataattgcccccataaatccaagtgccagtgccgcagcaagtagtaaagcagcaatcagacggatgattccagagagtgtatcaccaataagtacatccctgattgcatttgtcgacatcaaccccggaatcaaaagcataatgtcaccgatcataatcttatccatgcgaaggaatgggcacagcaaggttaatccacagattgcacagcctgtaaaaaaagacgccacaaactgaaaagtcacttcattcatgcataccggacgaagatattgctgtaatccccagatcagaacagccccaaatcctgctgcaacagcatccggaatacttccaccataaaaaaaagcaaaactgcatgcagccagaaggcttccaagaagtttccataacggtttcgtcttatttatgttaattttatcaaattctttccgaagctctgccgcagggacaggatgattacagaaacgacggctcagatcattcaactgctctaattttgtaaaatcatttccaccactttccctgatccgtcgggtctgtgtccgcgctccttcttctggaaattccatggtaataacgatactggatgtgatcacaaaaacattcatctgtgcagcaccacaggcataacccattcggttcagcgtatcctccactcgaaaaatctctgcaccgctgtttaacaatgcgtcacccatatcaagaaaaatatgtaaaaaatctttagatgtctgcataggattactcctttaattttgcagaaaagagtccggcataatatacgccagtgtcttacttctgcacttttgtattctgaagatagctttagtataaggcttaattgcagtgaatacaacttctattttatagcgcttacataaaatagttccaattcagattattttgaaaaaataagatgtgtttttcagatcaaaaaatatgagtagtagtcaagaggacttgatggattaatccgtcaagccctttctatttattatgagaaataatcagtgtacgagctgtcaagtattttcttccttcttataaagattaaaattcttgacagctctgtttttggcaaataaaaaaatatcatagaatctagtttaatagactcatatgatatttctttgattactcctgtgagtacccgtgaagacgaagacgcgcaaaagccttcattttcaaaggtttcgagcaggggatgagagaatcgaactcccaccaaaggttttggagacccctatcataccatttgaccaatcccctacaaagtatattatacatactttcaaaactacatacatgttgacatttccttgagaattaacttcctgcgttgctgattgagttttgtactccgcggggtcacttcgtgactccgtctctcagcattttggtcaagccctcacccgattagtaacagtcagctccatgtgttgccacacttccacctctgccctatctacctcgtcgtcttcaagggggtttacttcttaacgaatgggatatctcatcttaaggggggcttcacgcttagatgccttcagcgtttatcccttccgggcttggctactcggccgtagacttggcagtctaaccgatgcaccagcggcccgtccatcccggtcctctcgtactaaggacagctcctctcagatatcctacgcccacgccggatagggaccgaactgtctcacgacgttctgaacccagctcgcgtaccgctttaatgggcgaacagcccaacccttgggacctactacagccccaggatgcgatgagccgacatcgaggtgccaaaccactccgtcgatgtgaactcttgggagtgataagcctgttatccccagggtagcttttatccgttgagcgatggcattcccacttaataccaccggatcactaagccctactttcgtacctgctccacccgtcggtgtcgcagtcaagctcccttctgcctttgcactcttcgaatggtttccgtccattctgagggaacctttgggcgcctccgataccctttcggaggcgaccgccccagtcaaactccccgtctggcattgtcccaccgccgggtcacggcggctggttagaaacccaatactgcaagggtggtatcccaacagcggctccatggcaactggcgttaccatctcctagcctcccacctatcctgtacatgcaataccgagtcccagtaccagactggagtaaagctccatggggtctttccgtcctggcgcaggtaaccagcatcttcactggtacttcaatttcaccggatgcattgtcgagacagcgctcaaatcattacgcctttcgtgcgggtcggaacttacccgacaaggaatttcgctaccttaggaccgttatagttacggccgccgtttactggggcttaaattcaaagcttcgcgttaccgctaacctctcctcttaaccttccagcaccgggcaggcgtcagcccatatacctcacctttcggtttcgcatagacctgtgtttttgctaaacagttgcttgagcctattctctgcggcctggtttcccaggcaccccttatccctaagttacggggccattttgccgagttccttgacaatgcttcttccgccggccttaggattctctcctcatccacctgtgtcggtttacggtacgggtacggtataaacgatagcggcttttcttgacgcatggctcacggacttcgctactttatttcgctccgcatcacggcttcccattgccacccggatttgccaaagtggctggtaccccgcttgcaccgggctttccattcccggcttccgctttccttacgtgtccccacagttctgtcataccgcagtacaggaatctccacctgttgtccatcggctacgactctcgtcctcgccttaggccccgacttacccagagcagatcagctttactctggaaaccttggatattcggccataaggattctcaccttattctcgctactcattccggcattctctcttccatgcagtccacagctccttccggtactgcttcttcccgcatgcaatgctcctctaccaacctttcggttccttagtttcggtggcgcgtttcagccccggacattttcggcgcaggacctctcgaccagtgagctattacgcactctttgaatggatggctgcttctgagccaacatcctggttgtcttcgaaatcccacatccttttccacttaacgcgcacttggggaccttaactgaaggtctgggctctttcccttttgaccgcccaacttatctcgtgcagtctgactcccgataatcgattacgcggcattcggagtttgatattcttcggtaggctttgacgccccctaggaaattcagtgctctacctccgcaaatctgtatcgaggctagccctaaagctatttcgaggagaaccagctatctccgggttcgattggaatttctcccctatccacacctcatccccacccttttcaacggatgtgggttcggtcctccactacctcttacggcagcttcaacctggacatggatagatcacccggtttcgggtctactcctactgacttaaggccctattaagacttggtttccctacggctccacacctgaagtgcttaaccttgccagtaagcgtaactcgccggaccgttctacaaaaagtacgcggtcgcacatataaagtgctcccacagcttgtagacacagggtttcaggttctctttcactcccctcccggggtccttttcacctttccttcacagtactatgcgctatcggtcactaagtagtatttagccttagggggtggtccccctgatttcccacaaggttccacgtgtctcgtggtactctggatcctgctcagtctcatcagctttcacgtacggggctttcaccctctccggccggctttcccaaaaccgttctgttagcttcaaagaatcttaaatgcagtccgtaaccccggaatgcacgcattccggtttaggctcctccgcgttcgctcgccgctacttacggaatcgagttttctttcttttcctccgggtacttagatgtttcagttccccgggttcccttcctacagttatgtattggctgtaggatacatgaggtttgctcatgtgggtttccccattcagacatctccggatcacgggatatttgctcctccccgaagcttatcgcagcttatcacgtctttcatcggctcttagtgccaaggcatccgccctgtgcccttattgcttgacctttcgcttcatcaccctagcgtaggtgatgcggtcgtttgattctcattgtttttgataactttgttatcgatgtcttcctatcttgcgttttatgagatactctcatatctcttaacgttttgtatcaaggatatttgattaacttttaatcaaatttcatgtatgcagttttcaaggtacatatctgactgatcttttatcagtcatcagaaatctcaaatgctttttcagcttcatttaaaatctctcatcactggtaaattcagttttttcttttttgatctggcgcccacctgctctcccacaccgtctccagtgcagtaccatcggccgattgggtcttaaccgtcgtgttcgggatgggaacgggtgtttcccccaaccgcatcggcaccagaaatgtttcagcttgatagctaaacagtaaaacacatcttcgattttctacttcttccgttttagttggattgattcagccgttttcacagcctactgtatccaattccttagaaaggaggtgatccagccgcaccttccgatacggctaccttgttacgacttcaccccagtcatcggtcccgccttcggcagctccttctttgcagttaggtcactgacttcgggcgttactgactcccatggtgtgacgggcggtgtgtacaagacccgggaacgtattcaccgcggcattctgatccgcgattactagcgattccagcttcgtgtagtcgggttgcagactacagtccgaactgggacgttatttttgggatttgctccatctcacgatctcgcttccctttgtttacgccattgtagcacgtgtgtagcccaaatcataaggggcatgatgatttgacgtcatccccgccttcctccaggttatccctggcagtctccccagagtgcccaccttaaatgctggctactgaggataggggttgcgctcgttgcgggacttaacccaacatctcacgacacgagctgacgacaaccatgcaccacctgtcacctctgctccgaagagaaggtccgattaaggaccggtcagagggatgtcaagatttggtaaggttcttcgcgttgcttcgaattaaaccacatgctccaccgcttgtgcgggtccccgtcaattcctttgagtttcattcttgcgaacgtactccccaggtggaatacttactgcgtttgcgacggcaccgaatggctctgccacccgacacctagtattcatcgtttacggcgtggactaccagggtatctaatcctgtttgctccccacgctttcgagcctcaacgtcagttaccgtccagtaagccgccttcgccactggtgttcctcctaatatctacgcatttcaccgctacactaggaattccgcttacccctccggcactcaagtatgacagtttccaatgcagtccacaggttgagcccatgcctttcacatcagacttgccacaccgtctacgctccctttacacccagtaaatccggataacgcttgccccctacgtattaccgcggctgctggcacgtagttagccggggcttcttagtcaggtaccgtcactatcttccctgctgatagaagtttacataccgagatacttcttccttcacgcggcgtcgctgcatcagggtttcccccattgtgcaatattccccactgctgcctcccgtaggagtctgggccgtgtctcagtcccaatgtggccgttcaccctctcaggccggctatggatcgtcgccttggtgggccgttaccccaccaacaagctaatccaacgcgggtccatcttataccaccggagtttttcacactgagccatgcagctctgtgcgcttatgcggtattagcagccatttctgactgttatccccctgtataaggcaggttacccacgcgttactcacccgtccgccactagaattaaattaaatcgaccgaagtttcaataaagtaattcccgttcgacttgcatgtgttaagcacgccgccagcgttcatcctgagccaggatcaaactctctgataaaatgtttgattcactcaagataacaactagctatctctcgttttactgtttttggtttttcaaaccgttcttaaaaatgtaaagaattttcgagaatcgtatgtgtttcactgtttagttatcaaggttgtctgtcttgcgacagcttgtttactttatcacatctctttttctttgtcaagaacttttttcaagttttttcaaagtctttcgaactcttccggatttccgaactgttcttctgatctgtgattgtcggctctgttcaagcgacttgattactttaacatatttgttttaagttgtcaagcactttttttaatttcttttttatttcagaaattatcttaaattgtctctttctaagaaacaattatttccgacagctcaactaatataacaccgaaagcagtccctgtcaacagttaatttcataatttgacaaactttttatattttcaccctaatctccactaaattcccaacagacatccagtctatctgacaccggaattccaaccatcctccccatctatccttcctatattgcagcacccacataccatatatacacaacaccccagcttttccgtcccattcatactatatgtaggaaacttttctattccgccaaactaacaaaccaccatcccgcttctctttcagccatctctgtcacagccaacagccagcaagctcaaatcattctcttcggcgacatttgcagggcttttagaaaaacttagccccgggaaatctgcgttattcgcagatcactcactgtctgagccgctttgcggcgagtttgagttatctgtgaatgcttttagcagattttccggggcttagcttttcttaaggcccgaaaccgaaccgaagagaatgatttgagcttgcgtccctcttagctgatcttcccgggcttagtttttcttaaggcccgaaaccgagccgaagagaatgatttgagcttgcgtcccttcacatcccttttaccgaatctccaaaaaatccaccacctcataaagcgactcaaaaatctcctccgccaactccttcatctcctccgtcacctccatcagatccggcaccatgatcggatgcatccctgctgcataagccgccctgattccattatgagaatcctcaatcacataacaattctccggtctggttcccagtcgtctgcaagcctccagaaaaatatccggttccggcttactccgttccaccatatctcccccgataatctgatcaaaatatcccagcagcccgccatctgaaatctccgaacgcaccagtgcctcccgggtagaactggcaagcccaatcttaaatcccctcatcttcagatatttcaaaagctcctcaacccccggcttcttttccagtttacctccggaagcatgactgaaaaacacctctgccatctccgctttatattcctcatacggaaaatcttcaccataatgcttcagaaaaacccctttactcacaacactgtttgttcctagacactcatgacatgccgcctcaactcctgcgattccatgacgttctgccacttctttccacgcttgaagcacaagaatctccgaatcaaaaatcactccatccatatcaaatatcactgtatcaatcccactcgccataacttttgatcctttcctctttctctctgtcagcagactttctcaggcaaaaatatctttgacgacagtctgatcaacttattcaaaccatatataagccagtagtctgacaatctattttttcataatataaccaatcgcatcacgaatctgcgacacataaaccaagttgattccttccacttttccaacagaagacctacacacttccggaagcacaactgttccaaatcccagttttttcgcctcctgcacacgctggcctgccatattcactgcgcggatttcaccactcagaccaacctcgccaaataccatcacattatcaggaatcacaatatccttcgcactggaaacaatcgccagacagatcccaaggtcaattgccggctctgtcatcttcattccccctgcaatattgacataagcatccgatgcagccagacggagtcctactttcttctcaagcacagccataaggagattcactctgttaaaatcagttcccaccgctgtccgcctcggaataccgaaattactctggcacacaagtgcctggatttcaaccagaatcggccgggttccttccatagaacacgccacaacagaacccgacgcatcctccggtctgccattcagcatatattccgacggattcttcacctcctcaagacctgtattacacatttcaaaaacaccaatctcattcgtagatccaaaacgattcttcaccgcacgcaggatacgataagaagcatgccggtcgccttcaaaataaagcaccgtatccaccatatgttccagaactctcggacctgccacatttccttctttcgtcacatgacctacaataaaaatggacacccccattccctttgcgatctgcataaggatattggtagattctctcacctgagagacacttcccggtgccgaacttacatcttcgtgaaacatagtctgaatggagtcgatcacaaccacatccggttttctgcgctcgatcacctcacgtatcacttccaggttcgtctcacataaaagctgcatcttatccgtaaactgcccgatacgattagctctcagcttaatttgtctcagagattcctcacctgaaatataaagaaccgaaacctgcttctctgccagattcctgcacacctgtaaaagcagcgttgattttccgattcccggatctcctcccactaaaacaagggagccggggacgataccgccgcccagcaccctgtcaagttcaccaatctgagttgtctgccgttcatcttctgacaggctgatgtctttaaggatcaccggttcctgccttttttctgatgatttcattgctccagaagaggatggcttctttgtggaaactgtctcttccacaaaggtgttccaggacttgcatcccgggcactgccccatccattttgcagattcatatccgcactcctggcaaaaatataccgtctttttatttttcagcattttacaatctttacttctactcttgcagcattgccaagttccacgctaaaggaaagtttaccgcccaggtttgttttcatcttacctgcgcttgcctgctcaataaatacttcatattctgtatccggctccatctccactgtgatctgtgcatcttccggtccctctacatggaaatccatctgagcttcactctgtgtaagattaaatactgctgttcccggaactgattcgtaaacgaacattccgtttctctcgagcttggtaatctccttaaaagtttttactttatacatatcgccctgatgctgatagtctgataatttagacttctgtgcaagctcatagtcaccaaagctgattgctccattctcttccgtacggattaattcttttactactgccatttcctatgtcctcctaagactcttttgtttgccgctccaccggttcatctgccgatgccgtacattttttcactatctctgtacttttccgacattttatgtgcttattatataatacattcacttttttgaccagtatctcactgatttttttatactaatttcacaatttctgtgaatcatgtgagtcctctgctttaattgtaaatatctgtctgctcagagatttctactgttttttcacttcaaatgcaatctcgtttttatgaagtttcacctgtacactatctccacgttttactctgccttccagaatctcgtttgcaagcgcatcttctatcttactctgaattgcacgacgcagcggtctggcaccatatttattatcagaacctttttctgcaataaaatctttcacagcgtttgtcactgtaagatgaatttccatctgttctgcacatcgtttctccagtgttttaagaagcaatgtcacaattttccggatatcttctttattcagcacatggaacaccatgatatcgtcaattcggttcaggaactccggtttgaaaatccggcgcacttcttccatcacaccgcctttcattcgttcatagtctttcttctcatcattatcagacatgaatcccagacgtttcggttccatgatcgcctgtgcccctgcgttggaagtcataataataatcgtctgtttgaagtcgacttttcttccctgtgcatctgtaatatgaccgtcatccagcacctgtaaaagtatattaaacacatccggatgtgccttctcaatctcatcaaaaagcaatacactgtacggatttctgcggaccttctcactgagctggccgccttcttcatatcctacatatcccggaggagaaccaatcagcttggagacactgtgtttctccatatattcggacatatctacacgaatcatcgcctgttcacttccaaagacagcttctgccagagccttggaaagttctgtcttaccaacacctgtaggtccaaggaaaaggaaagaaccaatgggacgattcggatctttaagtcctactcttccccgtttcactgcctgcgcaacagctttcactgcctcgttctgtccgatcacacgtttatgaagttctttctccagacgagcaagacgtttggtttctccctctgtcagtttctgaagaggaatctttgtccagtcagaaatcgtctctgcaacagcagcttcatctacaacaagtttcttcctcttatttctacgttcagtcttaatgcggattttctccatttcggcttccacttcattttggcgtacctgtgctttttttgcgcgttcaatatctgcagtcttaactgcctgttctttctcctcacgaagttcattcagttccagttcatattgttccatttcaggtgctgactgataacccgcaagctgaacctttgatgctgcttcatcaataatatcaattgccttatccggaaggaaacggtcattgatatatctttgtgacatttttactgctgcctcaagtgcctcatcttcaatctttaccccatgatgtttctcataatatggacgcagacctttaaggatctcaacagtctcctctgaagatggttcttccactgtcacaggctggaatcttcgttccagtgctgcgtctttttcaatatatttacggtattcctccagagtagtcgcgccgataagctgaatctcacctctggaaagagaaggtttcaggatattagaagcatccagtgctccctccgctccacctgctccgatgatggtatggatttcatcaatgaacagcagaattccctgatgttcttttacttcctggatcacattcttaatgcgttcctcaaattcacctctgtatttgcttcccgcaaccatgccggaaagatctaacacaacaagacgcttatccttcactgtatccggaaccattcccataacgatgcgctgtgcaagtccctctacaatggcagtcttacctactccgggttcccctgtcagacacggattattcttcgtacgtctgctcagaatctgaatcagtctggtaatttctttatcacgccctatcacaggatccagttttccctctgctgcaagctgtgtcaggtcacgactgtactgatccagcgtaggggtactggtcacttttttgtttcccgcattccttgcgtactgaaattcctctgcaatggtatcattgtcaaatcccatagctgtcaggatagccgcaaacaacttctggatatttactcccattgtaaaaagcagtctggttgctacgcagtctgtctctttcagaagcgaaagcaacagctgctctgttccgcaaagacattccatactctcagcatcttccttcgcctgttcaatgatccttcttgctctcgggctgtactggggatcttttgtttctgctgccacagtattgccctgaaccggtgtaaccaggctgctgataagttccctgagtttttcttcttctacgttaaattcctgcagcacttttcccgcagtgccttcaggttctttcaaaagacctgcaagaagatgttctgttccgatatatccatgtccacaggttttcgcagttgtctttgccaatttgagggcattctctgcctgtctggtaaattgtctctccatgtcctctcctatctgttttcatcatattcgtcaaaaatctcatcaataagctgatgtacttcctctctgcttacgctcttgcaacatcctttcgcaagcgccaccatgagattctgtttcaattcttccaatgctttccgtttatttacatcaatagaaatcactgcaccacgtctgcggtcgatagtgacaaatccctcctgtcgcaacagtgaatatgctttatttactgtatgcatatttatcccaactgtatctgcaagctgtctcactgatggcagtgtatctccctcctgcagtcttgacgtagcaatccccatgatgatctgattggtcagctggatgtaaatggcttcatcactgctgaaatctatttctatcatcatacgttttcttctcctttttgtgttacacatatcctagcacaaaccaacattttttgcaacagaaagacgtattgctgtattatttttcaaaacaaaaaggggtgtactgccatgttctcacacagcatgcacaccctttatcttctttctgtcaactgaatttcatctacatgacttgattattttaagccaatgatcttattgagctgttctctgttcagaacaaggttaaagcctaatggattaactgcataagccattgccttatcgattaacagctccggaagttttgcaaacggtactttcgcaatacgcagcttctgaccttttgtaaacttctcaagttccataacgtctgtaaatacaggctggagaatttcttcttttttatttttgagatacggaatattgatcttcttaggatcttcaggatctacattcatagcaaccagatattcggatttcttcaggtttacgattagttcttcctcaagctcacgaagatttccatgctgatccttctctaccggacggcggagttcctgcataaagtaaatgccggaaagctccagtgtaggattcagaagcggtctcttagccggctcaatcttgctcatatctgcctgttttgcaatatcaggaagatcaatctcaatcttatcttcaccatctacccatacaactgtatttacgccaattgcatagaaagttccatataatctgggataatccttcttggtaaatttcatacccataagaagaaccttttcttccagcatttttttgccgaattctttgattccttcttctgttgaaaaaatccatgcctgatcattaaatgtctcttcatcacatttcacatacggaagctttgtagcctgtgaatatgccacaaaaatctcctctctggtctgtaattctttgattgcttcttctttgctgattcccatgctcttatcctctctgtctcatttcttttatgatcttctgtattttcttatctacataatttctgttcataaattttcccctgctgtccggagttcgattacgtttctgttttacagcactgttttattttataacagattgcatgaaaagtaaagaaaatagcctatattatttatgcaaaaacatttacaaaaaaatcagaaaacagtccggtctggttttaaacctttctgttttctgatctgttttacagtaatcatccaaaatacattttttctgaaactgcagcacctcaaaattatttatgcttcatcaattgccttaccaatatcatggcgcatatatttatttgcaaatgtgatccactctgtggcttcataggcattttttcttgcttccttcaggtcttttcctgtagctgtgattcccaggacacgacctccgttggttacgatctgaccatcttttaatttggttcctgcatggaaacaataataaccatccttacctttgaagttctcaaatccgtacatcggaatacctttttcatatttcacaggatatccgtcacttgcaaggactacacatactgccgcattatcctcaaactgaagatctatctgatccagagttccgtttacacaggcttccatcacttcgatgatatcgttcttcatacgaggaagaacaacctgcgcttccggatcgccaaaacgggcattatattccagaaccttcggaccatccggtgtaagcataagaccaaagaaaatgattcccttaaacgggcgtccttctgcagccattgcgtccactgtcggctgatatacatatttcctgcagaattcatctacctcttctgtgtagaatggactcggggagaaagttcccattccgcccgtattcaatccctgatcaccgtcctgagcgcgtttatgatcctgtgcggatgtcattgtacggatagtttttccatctacaaatgataacacagagacttcacgtcctgtcataaattcttcgatgaccatggtatttccggcatttccaaatttcttatcttccatgatctcttttacgccatcttctgcctctttcagatcctgacagatcagtactcccttgccgagtgcaagaccatcagccttcaggacaattggaaatctggcttctgtgcggagatattccagtgctttctcaggatcatcaaaattctcatatgccgctgtgggaatattgtattttttcatcagatcttttgagaacgctttggagccttcaaggatagctgcattctttctcgggccaaagactttcagaccacgtgcttcaaatacatctaccacaccgccaaccagaggatcatccataccgataatggtaagatcgattgctttctcctgagcaaaatcagcaagtttctcaaactccatagcaccgatatctacacattctgcaagttctgcaatccctgcatttccaggtgcacaataaattttatccactttcggactctttgaaacactccatgcaatggcatgttctcttccaccgctgcctacgatcaagactttcattttatttttgctcctttatctactcttctgtatcaaattcctctgtttctactcttccatccaccactttcactttgtcattggcaataagattgatagctttcggaagaatcttccactccgctttctccataacacgtctctgaagaacttccggggtatcatcagatttaatctttacggccttctgaagaatgatcggacctgtatctgtacctgtgtcaacaaaatgtacggtcgcacctgtcacacgtacgcctctttccagagctttctcatgtacatgcaatccataatagcccactccacagaaagacggaatcagtgacgggtgaatattgatgatcttatttggatacgcttccacgatcattggaggaatagccacaagaaatcccgccagaacgataagctctacgccactttctttcagcttcgcaagaagtgccctgtgaaattcttctctgttctcaaactgttttggggaaatacatacagcttctatgttgtgattctttgctctctccagcgcataagccttcggattattgctgataaccagagaaacttctgcatttgtaatctttccacagtcaatggcatccaggatagcctgcagattcgtgccgcctcctgaaaccagtacaccgacttttaacataaagtcactcccttttcaccatcttcgatacgtcctactacgtacggagtgtcacctgctgctttgatcgcttccattgttttgtccacatctgctgcatctacagcaaggatcattccaagtcccatgttataagtattgtacatcatctgttcatcaatattgcctttttcagcaagaagtttgaagattggaagtaccggatagctgttcttttccacaactgcacgtgttccctctttaagcatacgcggaatattttcataaaaaccgccgcctgtgatatgactgcatgcgtgcacacgaactccggcatttttaatgctctttaatgcttttacatagattctggttggtgccagaagtgcttcaccaagtgttgttccaagttcttcataataagtatcaagagattcctttgtcatatcaaaaactttacggacaagagaaaatccgttactgtgaacccctgtggatgccataccgatcaaaacatctcctgctttcagttcttcacctgtgatcatctcttttttatcgcagacacctactgcgaaaccagccaggtcatattcgtcttccggcatcagtcccggatgctctgctgtctcaccgccgatcagagctgcatctgactgcacacagccttctgcaacgccgcctacgatagctgcgatcttttccggataattcttaccacatgcaatataatcaaggaagaataatggttctccgcctgcacatgcaatatcattgacacacatagcaactgcatcaatgccaatggtgtcatgcttgtccatgaccatagcaagttttactttagttccacatccgtctgtacctgataataataccggttcttccatttctttgatcttagcaagagaaaaggcaccggaaaatcctcccagtcctcccagcacttcttcacgcatggttctctttacatgctctttcatcagctctactgatttatatcctgcttcaatatctactccagcggtcttgtaatccatgataatcctccgtttttacccctgatcctgtttatggacctgagttatcttagtaatttttatatccgacttcctgtaatcttgcgtcttttgcttccacctgttcttttaattcctggctgtaagcctttaattttgcaagaagttcctcatctgatgttgcaagtatcttagctgccagaagtcctgcgtttgcgcctccgttgatagcgactgttgcaaccgggattcctgacggcatctgtacgatagaataaagggaatctcttcctcccagagaagtggtgtgcataggaattccgataaccggcatcgggaagattgctgcgcacattcccggcagatgagctgccattcctgcacctgcaatgattactttaaagcctttttcctctgctgtttttgcatattcaaaaaagacatccggttccctgtgtgcggaaatgatctttatctcgtaatcaattcccagtttctccagaatgtctgctgctttgctcatgatcggcatatctgagtcgctgcccatcacaattcctacttttgccatgattattctccttttcttctcaagtattctcagacagaccagattttatctgtccgggactttgtttttattttattgataaaaaaagtacggtcagaaaagattttatcaaaaccctctctaaccgtagattctactaagattccctttttctgtcaataaaattaatgcaaagaaatattttaacgaactaataaatttttttgtattccgaacttaataggaaaatgcctttattccccaaacggctcgttcagagcttccgtacccggaaggacaaatcttccatcttcaataatagagatcatatccccctcatcatcaatcgtacggatgcttcccagttcgtcatatgggatcgtaatatctgtgtgacatccataataagcaaggctgacgtcttcttttcgcatctcggaaatctcattgtctcttgcgatgatctctttaccatccggattatagaccggagtatcttctgaccaactgtaacaggtatcaccaactgcaaaatgcggtcccattttctccgcgatcagaatcggaagtttgtctgcgatattatatttctgcgctgccacataagctgttgtattagttccgatcgcaaattctcccattgcaagtttcggatgatggaacagaatattatcttcaatatatttacggttctcttcctctgtctcaaaattagaacagctgtaatcgatcacctgtccgcagtcaaacacaagcttcaggtcacaaaactgcagtccgttaagatatacttttgaaacatgaagcattccgcctgttcctgcaagcaccggtgaagtaaatacttcacccagaggaatatttacatctgccacacagttctcaaaatttgtctgtgttttcgcatctgttaatgtatgaagatgaatgagcagatctgtctcattctctccctttcccttgatttccacccattcacaggtatcaagagtatctatgatcgtctgctggatcttctgatatttcttataatccaatgtattgatctttacgatctcgcggaaaatttccggaaaatcctctccgatctcaggtatcggataagcaatgatcgtaaaacttctttcctcacctttgatataacgatttgtgatttgaccggattcattgtccagttccagctgaagcttctgctgtgcttctgtaaacgcccagctttccggtttacttaccggtgaaaacggcttctctccaaatgtctcgatcacagccggtccgccatgtacatctgccagatctgcatattcatcataagaagtctgcatggcacgaagtttacgctttacaaaatccggattcagaaacagcgcactgtcctgtctgtggtcataatcaaactgcggatttgcaattcctcctgtaaatccatttctgaactgattccgtctgttcaccgcatgaagtgcatggcggtaaataaccgtctgcagccccatctcccggaactgaagaacagccgcttttaccatacgctcaaagccaagatgataacgtatattaaccgttttcttctttgtaatatcttttcttcctgtgatgaatcccatccgatagccttctgtataagtacgtgccatctcatcaatttccctctgggaaagtgaattcataaattctgctgttttcagttcattttccgatacatattcgccggactgatacagataactcagatcgctcagatcagaatccatgatcatttcaaccacaaaattattctcaggatcaatcgcctctctgatccgattttccaccatatcctggcagtagtcattcacataggaaacgagaatttctttcacctgtttctcagcaggaatttcttcctgcgtaaatgcagaatagatttccagaaacaattcaagtacaaccgtaagatcccatgcttttttttcaaacgcataagcaatcgtgccatgaagctctgtataaagaaaggtaaatacttttccgtattctcccagcattttctgtgcatatgcaggatttccataagaattttcataattttcgggcagaatatcctgatataattcatgattctgttcctgaagttcttcaagatttttccccgcaattccatggtccatcacatgaatcacctgctgtaaaaacattgcttcctttgtaaaaaaatcgcagtacggttcttctgccattttctcgtccggtatctgagcgattctttctttcgccagttcataccgttccataacccattcgtccaaactatatttctcctttttctatcagacttccctgttaatcagccggaaattcccatcagaaagattcccagccatccgatcattatgattccgtttgcaatagagccgatcatacctgctttgtgtgtccggttttcttctgaaaagcttttcagtcccatcgcaaatccatatacagacagaagcattgcgcaaagactgatcccgcctacaatatatccgtattgtccctgcaaaaaaaatgccagcaaaactgcagtcacaaataaaaccagtgaaacagccgccagcactgctgacagttttccctgctgtgcctctcttttctttgcaaacgcatatctatatctttttgccataaatttttctcctcaggtgatcgcagataaaaaaaagcagatatccaagagccgcccctgctgtattcaatatcatatcatctacgtcaaagcacccaacctttgtaataagctggatgacctctaccgtaacactaagcccaaatcctgccagtacgatcagccatccgcttctcattttgtccagaataaccggcagtataaatccaaatggaagaaaaccaattacatttccaaaaagatttgtaactaccgccataagtccaagctgttttctgtatacccagaaacgccttatctcaacaaacggtatcagattatatctgtactgtctttcttccattgctgctcttccgtattcttctgaaaagaacagaaaataaatcagtgccagaacatacaggataaacaaaatggttcccagtgtccgtatgatatgcttcgtttcttttttcaatgttttctcctgtttctgaagccttttatatcaatatctctgatttctttttcagcagtcttgcaccgtttacgatcatcatgatccctgttacgattcccgttgccagtacaatgatcccgactgtcagactgcaggctcctgtggaagacatggttttataaattttttcgttcataatcgtcctcatcagtatcatgatctgctttcgcagatcatgatatcttatttataaatcgctgttacctgtatttgcttattttgcaccgtactgctcataatatgcgtcgattgcggctttcaatgtatcgtcaatgattacttttcctttatattctttattataaagatgttcaatgacctctctcattgtaacaatcgcatttgtttcaaacccataaaggtcatggacttcgtcaagggcacacttcacgccgccttttccgacttccatgcggtccagagaaaccataagaccgacgatttccacatcagccgcaccttttaccttcggtactgtctcttccatggatttaccggatgttgttacatcttcgatcatcactacacgatcgccgtcttttaatttacttccgaggaagcttcccttatctgcaccatggtctttttcttccttacggtctgaacagtagcggatttcttttccatataattcgctgaatgcaattgcagttacaacacttaacgggattcccttatatgcaggtccgaaaagcacatcgaaatcatcgccatatttatcatgaatggcatgtgcgtagtactcacccagtttctttaactgagaacctgtcacatatccgcctgcattcataaaaaacggggactttcttccgcttttaagggtgaattctccgaatttcagaacttcactgtctaccataaattcaataaattcctgtttatactgttccatcttatgttatgcctcctgtatctgttttattttacaataccaaccatctcttttacggaattgaatccattcttcttcatgtacgcttcaattccatcgatcacttccagtgtcactgccggattgtggaaatttgccgtacccacagatactgcgctggctcctgcaagaataaactcaattgcatcctctgcgcaggaaattccgcccattccgatgatcgggatattgactgcctgtgcaacctgataaaccatacggacagcaatcggtttcacgatcggtccggaaacaccaccggttttatttgcaagcgcaaaagtcttcctgttgatatcaatcttcattcctgtcagtgtattgatcagggataccgcatctgcaccgcctgcttccgcaccttttgcaatctctgtgatatctgtgacattcggtgttaacttcatgatcacaggctgttttgcaatctttttgatctgagcggtaagttcctctacatgatgtgcatcctgaccaaatgcaaggaatcctgcgtttacattcgggcaggaaatattaatctccatcatatcaattggctgatctgccaaacgttccaccactgccagatattcttccggcgcatgaccgcatacatttacaatgatctttgtatcatactgtttcaaaaaaggaatatccctctcacagaaaagatcgataccaggattctgcagaccaatcgcattcatcatgcctccgtaaacttcagccacacgcggagtcggatttccggcccacgggacattggctacgcccttggttgtcactgctcccagcttattaatatctacataatcagcaaattctgctcctgaaccaaaggttccggatgccactgttaccggatttttccactctacgccggcaatatttacactcatatccatcagatttccacctccgtagaaagaaataccgggccatccttgcagattctcttattattcacattgctatgtgcatctttttctctggatttgcacacacaggcaaggcaggcaccgattccgcatgccatacgttcctccagggaaatataacattcaatcccattttcttcggcatatttcttgattgcacgaagcatcggagttggtccgcaggcatagatcacgtccgcttccagagcattctctctgatagcatccataacattgccttttgttcccacactgccatcctctgtggcaatataaagtgttcccgccgcctcaaattcctctctgaggaacgtatgacagtccctgtatcctgcaatgatctgttttttctcacatttcatctgctttgcaagttccaggatcggaggaacaccgattccaccacccataaggaaaacttttttcccctcagccttctctacaggaaaaccatttcccagaggtcccagtaccggaatggtatctccggctttcatctgtgaaaattcatcggttccggttccctgtccggtcactctgtaaaccagatgaagacggccattttctttgtcaatctcacaaagactgatcggtctgggaagaattttggatttatcatttgtataaagagatacaaactgtcctggtttcgcatctgctgcgattctgtcagtctggatccacatactgtaaatgcctgcaccaatgctctcctgacttacaacagtgcagatttctcttgtcttttcgctcatttcatgcctcctagcgattgtttaaagcagtactgatgtcttcgatcatatcttttaccgcctggcgggatgcatctgcataatttaattcaccaaaggaagcatatttttcctgtttgtaagctgcaatgattcctctggaagagttgacgatcgcaccaagtccgtcttcattaaagaaatgaacaagatcggcaccttttccgccctgtgcaccatatcccggtaccaggatgaaggttttcggcatgatcttacggagagtttttcccatttccggataggttgcacctactacagcacctacatagctgtattcatttcccatatgtgattctccccactgggcaaccttctctccaacccactcataaagcggacgtccgtcaatgattctgtcctgaaactctccgctggacggattggatgtttttacgagtacaaaaagccctttgttctcttctttacatacatcgataaacgggttgacactgtcagatcccatatatggattgattgtcgcaaaatcttcgtcaaaacctgcgatcctgttacttcccacctgaactttacccagatgtccgactgcatatgcagcagatgtggaaccaatgtcacctcgtttgatatctccaataactaccagacctttttctttgcaataatcaatggtgttcttatatgccattaagcccggaataccaaactgctcatacattgcgatctgtggtttcactgcagggatcagatcgctgattgcatcaacgattcctttattatactgccagatagcttctgctgctccctctaatgtttcccccagttcagaaaaagctttcttctgaatatgctgcgggatatagttgagcatcggatccagtcctactacgataggagcgtttgtttttttaatgttttcaataagtttgttgatcatgagtctttcctcctgaatattgatatggtatttttatgcattctggtatacaacttttccatcacagattgtatagagaatttttccctttactttccatccgtcaaatggtgtgttgcgtcctttggaagcaaattcatttttatctattttatattcgtgatcaatgtctgcaatgacaatgtctgccggatgtcccttctgaagtgtacctctgtcacttcccagaatctgtgctgggttccagctcattttctcaataagctgtgagattgtaagaattccagtttctacaagtgcagtataagacaatgcaaagcttgtctcaattcccacaatgccaaaagccgcattccggatagagcctgtcttctccggcactgcatgaggtgcatgatctgtactgatcactttaaaggaaccatccttcagtcctcggatcagtgcatctacatctttcttcgtacgaagaggagggttcatcttatagtttggatcatcacatttaatatcatcggaagtgaggataaaatgatgcgggcaaacctctgctgtgatattgtccaatccctcttccttcacaatctccatcatcttcgcaacaccttctgtggaacaatggcacagatgcagtcttgcccctgtctctctggcaagaagaatatctctcgctgcgatcacatcctcaactgcattgcagatacctggcagaccaagtctccgcgcattctcatcctcattcatacatccatcaccgcgcagatcaatatcctcacagtgagcaaaaatcggaacattgaatttctctgccacttccatagcttctttgcaaagtctggtattcataacagatttgccgtcttcagataatgccgggattcccgcttttaccattccttcgatatcagaaagttcctgtcccttctccccctgcgtaatggcacctgcctggagcacatgaatgccggcaagctgttttgccttattatacacataatttacacgatccggactgtcaattaccggtgttgtattcggcattgcaacaaccgttgtcacaccacctcttgcagcagcccgggaacctgtctctatatcctctttctgtgtctgtcccggatctctgaaatgaacgtgaagatcgatcagtcccggcattaccagacatcccttcgcatctattactttgtcgcttttatcttttattttaagtttctcaccgatctcggtgatcacgccatcttccagataaatatcgccttttttatcagtgtcagtagccgcatctacgatacgtcctccctgaatcagaatacccatgcaattctctcccttcgttgtcgtttgacaataactttctaatatacataatacacgaaacttcttcttttataaagcctttttttactgatgtgcagtcttttttgcttgacaattcaaaatgcgggagatataatcagttcatatctggattatttaatgtatagtcactggtttttagagattatataacagtatataatctgtaaaatctggtgatttttttatttgccagaaactatataatttttttattttttatggaggtaacaacatgaacaagggaactgtaaaatggttcaacgcagaaaaaggttacggatttatcactggtgaagacggtgcagacgtatttgtacatttctccgctatcaatggtgaaggattcaaatcccttgaagaaggacaggctgtaacatacgacttaacagaaggtgctcgtggtatgcaggctgcaaacgttacaaaattataatttataatttttgttaacgcgagaggattgaattccgcacttttctatacggattaaacctcaaaaaaatccccggatcatccggggattttttattgcttttcttctgtgaatccatcagagattcaatttctatttagcatctgcgctgtctgcatccgctgttgaatctgctgtttctgcagctttatcgtctgctacatttgtatcatctgcttcttcagatttatctgcggtttccgtttcagaatcatctgcggttgtgtctgctgcatcagcatcttcactgtctgtatcagtggaagctgttgtatcttcttcctccgctgtatctgcatcagtgctgtctgtaccatcggatgcatctgttgacagattcgaaatgtaattgtcaagtgcagtagtatccattactgtattctgaaccacattctctttggctcctgtcacttttacatatgcagaataaccaatccatgcaacaatcacaacacaaatgaatgcccaggcaaacatttccagtccaaaaagtactttttcttttctgtctgttttgttatgcagtccttttctggccttataagcatcgactttcttctggctcatgatagatctcctttgcatcaatatttcgtattttctgattatagcacactttactgcaaaagaaaacaattagtttatactgcaacgatcactccgccgtcatttgcatacatagaacttacacccgctgtatcaaggactacgatctttgcaagtttcattctctcttcaaaagcctctttgagcacctgtgctcttgccggacaattgcagtgactgatggcaagaaccttctctgcactgtccggagttttctcgattacctgctctacaagcttgatcagagcacgattcatgcctcttgcctgatccagctggcagatatttccatcatccgtagaacccatgaccggtttgattttcaatgcactggccactaacgctttcactttgctcagacggccgttctttctcaaagtatcaagattctcaagtataaaaaatgtatgctgtccttcaatataatgttccacagttgaaacaacttcttcaaaactcatccctgcttcttcgcattcctgtatcttcattccgatcaggctttccccgatggatgcggaacgtgaattaaacacatgtatttttttatccggatggtcttccataataagatctctgccaagcaacgcactgttataggaaccactcagctcagaagacaaagtcactgcataaatatgctcagcctcgcagtcatatgctctcatatatctctcaggtgacgggcaggctgatttcggacattccgggcaggctgccactttatcaataaactctgcctgattaaatgtttcatcatctatgatctgttcagctcctaccatcagagtcagtggaatggattcaaaacattcatctttcttccattcgtccaaaagttctccacaactatctatgataatcttatatctcaattatatcgtcctcttttccattatatgtagtattcaataccagatatatcttatcacaccgctttacgtttgaaaagactttttaataaaaacactgttctttttttcaaaagtgctttataataaaaagacgcttcccgcaaagtgcaggaagcgctgcctaatccacaaaatatgttcagaaatatgcagcaatccagaagtatttttttaattctgaacagctgtaaatcatgttatcagagaggtgttgtatgcttgctttaaaaattactgatgtaaaagattttatgaataaactcctgatcggtgaggtatttgaccgtttttctcttgtcgaggcatctgtgacaaccttcaacacttttaccataaacggaaaacttcattacgatttctttgatactgacacaaaggctgcttttgaggagaattccacagaatattccctctggcatgatgtaaaaccttattgtttttctatcatacgcggcagacgcacacctttgaatttcaggattgtatttgaactttctcatgatcagacacagtcgttgttaaaaaatgaacggcatattgcagatattcctgtgcaaagcttttatctgaatatccagtacaagaaccagtcccttttatgtacaacaggtgtttcttatacttcattcagtccggataaacgtctggaacatctctgggatgattccatgactgtttttctctccagtcatcacattccctgtgagaaattatgagtagattctgttatcagtctttatccgaataacgcagataatagaccagaatatctataaactcactgttcgtcggtttatctgccattgtacatcctgccatttcttccagtgtatccttatgattcatccaacataagtttaccagtgttcttatgttgtgttctacattagacggcgttgatttatattttcttgcaatgaccggataaatatctttggtgacttttaccggtcgctcataaattttctgtgccatttctactgcatccacaacataataatatcctttatactttgatgttgcacccaattttctaataactccataaactgcactcatacatcgttcctcctgtaacttccataatctgtgtttttacagatttggatatctcatttatttacacacatttctctataagtaaatgaaagtcacgatattggctgcccggaagcaccattgcagtcactattctctgtaacccgttatattttatgcggattcggcatattcattaaaatatcggcaacttaataataggaattcataagacatttgtcaataccaatgtaattgttttccacaaaaataaggagcaaaagttattctccgctccttatttgatattctgctattctgacaggcgtatctgtcctctcattgatctgccggcaaattgcctgctttctatcttattttgcaatcatcagcaaaatttcattgcttctctgaacaaatctggtcatttcgtccggtgaaagctgtttatggctcatcatcgcaaggtcatacaactgttcacagataagcggagccttgtcagattcctgattctctgccagatatttaaccaatggatgattcgcattcagaaccagtgtttcctgtccgccaaacatattcggatccattccatacatattatacatcttcatcatatcctgcatacggcggctctcttcggaaagagtcatcattgctgatacattttcatttttcagattctcaacatgtacttccagtttatctttattaaggctcttgcggaaaagttctgtcagtgctttgacagtttcttcatcggcagtaccctcacccttcatttcttcggtcagatccgcatcaatacgcttaaactgtacttcctgatgtttctgctcaagactggaaataaatgcactgtcaatattatgcttcaggataacggcatcttttcctgcttccttaaacatattgatatactgactctgctgaacttcatcagttacatagaaaattactgtcttctcaggttctttcgcttccgcattgtctttgttttcagactctgctgcatcttctttcttttcttctgtctgagcctcagtttcttctgtttcttttttattctcttcaatgcagtcctttaatgtgagatatttgccatcaagattcttaaagagtacataatctcccattttctctgcaaacttagcatctttaatacagccatatttaataaacgggctgatatcatcccagtatttctcataagattctctgtcagtcttgcacattccggtaagcttatctgccacttttttggaaatgtattcagaaatcttctgtacaaatccgtcattctgcaatgcgcttcgtgacacgttcaatggaagatccggacaatcaatcacacctttcagaagaagcaggaattcaggaattacttccttgatattatctgcgataaatacctgattgttataaagtttgatcgttccttcaatggaatcatactctgtattgatcttcgggaagtacaggataccttttaaattaaacggataatccatattcagatgtatccagaataacggttccttataatccataaataccttgcggtagaattccttgtattcatcatctgtacattcatttggatgcttcatccagagcggattaatatcactgatggaaaccggacgtttattgatctttactttatcctttgcaggagaaatttcaacaacttccttttcacctttatcattttctttttcttctgtctttgcttcctcatgaatatgttcaacaactacatcatcgtctcttaactcagattcatcaattgtctcatattcctgaggtgcatttgctttggaaaggtaaatatgaaccggcatgaaggaacagtatttctcaagaatctcacgcatacggtactcatttgcaaattccaggcagtcttcattcaggaacagggtgatttctgtaccaatcgtattcttgttaccttcctggatatcatattctgttccgccatcgcaggaccagtgtacaggctgtgcaccttctgtataggaaagtgtatcaatatgcacttcatccgccaccataaatgcagaataaaatccaagtccaaaatgaccgatcatctgatcatctgtagttttgtctttatatttctcaagaaactgagttgcacctgaaaaagcaatctgggtaatgtatttctctacttcatcagcagtcatgccaataccattatcgatgaatttcagagttttctcatcaggattaacaattacctgaatctccggtttgtatccttccggaaaagtatattctcccattacttccagttttttcagtttagtgatcgcatcgcatccgttggagaccagctctcttacaaaaatatcatgatcggaatataaccatttcttgatgattgggaaaatattttcactgttaattgataaatttccatgttttacagccatgctgtccacactcctttttgtttttaatcatttgccgcaactttatctgtcaatatactgcattcttatctgttctgcctccggagccaaaactatcctctcctgtttatcctttgaaatagcttttgactcctgtaagttgcttctctgaaagatatagtaataccatttattccaaaagtcaagaaaaaattagcactcactaaaaatgagtgctaataattttatattttacatattcccctgtatttttttcttcagataactcttatttctttcgtcttttgtataccacaactcccacaatacatcctgctgcaatcgccagaataatcacaaacggtgtgatattagtcgtatctcctgtctttaccgctgttttcgcacttgctccattcggctgcggagtcggagttgcggttacagtctgcgcctgtgtaatactgaaattcacctgtttagtatcctgctcccctgtattcttccattcacttccattatacttctgacggtcaaatgtaactgtcaatgtgtaggttccggccttcgtaattccaaatgcagcagtataaggtgcactgctccagctatttgtattgatcactttccagttatacggtacatagcggacatctccctttcccggactttcattgtccatacccgctccgactgctgtaaatgtaatctttgactgtgttgtgtatccatctgaactgattcctgtaatcttattatctgccggatctgcaattttcgccttgcgggtagctttaaccgtaaactgaactttcacttctgcactgatctgctgttcattatcaatcacaactgactctgtataggagccggcctttaacccctccttcgggcggattttaaatgtacagctctcccccggtgcaagctctgtggctgaaagtttcccgattttaaagtttttacctgacggtgcatttaaagttacatttgtattcccctcattcgtcactgtaactttctgcgcttccggtgcctcactatatccttcttttgcttttccaaaattcagttcttctggtgttacggataatttataaatctttttcacttccgaaacagtcgcagaagctttgatcgttgttaatacatcttcctgtccttccgaactggtctgggctatctgaatactatccagataattgccgactttcagaccggtcaccggtactgctgtaaatgcagcagaatctcccggctccagcactgatgccgaaagttccccaatatcaaaatactctgcatatggctgcatcagcgaaacagttgtatttcctgtattggtaagtgtaatggtcgtcgcttcaggagtatcataaccttccttcagatcatcataactgaaagattccggatctgcctgaactgctgtgatctgttcctgttctgcctcttttacagatacttccgcagttacctgcgctgctacttccgaatcctcttcactttcaaatatcagggtatcactgtaatcccccttcgtcagaccggtttttggctgtaccatgaacataagagaatcaccttttgcaatctgtattcctgatacagcttcacttccatcttcgttcatcacctcaaaataatctgatttcggtatctttaaagtgacagttccatcccctgtatttgttacggttacggacagtgtctcattggcctgtgtataattttcttcgatatcgctgaaattaagacttcctgtatttacatcaagagactgtgcctcaagagatgcatctgcattgtcacctgccgatggagcctcgctgtcatccggcgtctctgtcggttctgcagaaggctcatccgaaggcttcagatcttcgtcatctgatgaatcatcctcaccttcaactgcaatcttcgcttcaaaagaaacctcaataccttcttccgtccggtatgtgatcatatcatcatattcacccggttccagcccttccctcggctgtatccatacgcttacagattcacctgcactcagcggttctgtaatatcctgaaccataaaatgttccggactgatctcctgaaaattcaagttctcatttccggtgttcgtaatctgcacatactgtgcttccacatcctcaagatcactctttactgttccaaaatcacaaatctgatcttcgctgtcctctacagtggcagtcgcttcgtaagtcttttgatctttctctgatccatctgtctgcacatttccgttctcatccacctgcagctgatcttctgtataaattttcatctgggaatcatcagtaccttctgttgtttcctccggctgaccttttgtgttctgagagtcatcttcctgttcattccctgcattctgctgtacatcttctgttctatctacatcctgattttcagaatcctgactgccttctgcattatctgctgtttcttccagctgtgcctcctctgttccatctgccgtttcttccagctgtgcattctctgttccatctgccgtttctgtctgctgtgtatcctctgcttcctgttccactgctttcgcctcttcttcagttgcagctacctctaacgtctttgcagtaagaatacctgtcagtccgcttccatctacaggggtcagatcaagcaccagtctgcatcccagatcatcctgagtgatcgtataggtcttctcagtacctacctgtgttaactccttctcccctgtctgtcttgaccaggaaaaagtgaaatcttcatctgtaaccccttccggtgtaacctttgcataatctgcactcactactacgcctacagctgccagtcccttaatcttaagcttaccgcccaattctcctgacggagctgccgcaaaaaccatggatggaatcattgaaataaccatcatcacagtcattacaactgcaagaaatctctttctctccatctgtagtcctccttttcatttataataaaatttgtaattattcagcagccactctgaaggtactgaataattacagttctgtgatgcttctgtgtctgtctgcccttttcattcccatcacagaccacagcaccgtttttctctttataaaagcattatagcatcgcattttccggaaatgtaatctgtattttctcccttaaaacaacttcagcccctgagtatcagagttcaattttctccaatattcagggaccgaactgtgttttacagttatttctccgatatatcacgtgatatccataatttgaccgaacagtttttatccttctactatcagatattttccatccggcagagcaaatacttcacttgcatcttccagttcttcatctgacattccttccacatcagcgcctgcttcttccagatattctctcacttcttcaatagaatccacaacctgcgccatgcaatcctcaaggaatgcttccgcagcttcatatgattctgctaccggctgtggaaaaagctgctcctgattttcaagaaacgtattaatacattcttctgtaaacatttcaaataacctcctcaatctttccctttgcccggatcagcttctcaaggaccggttcaacctgttttgtcatataggacgcagctgaccgtaccccctccttggaatgctccatggcaaagccatattttaccgctttaagcatctctatatcattatattcgtctccgaacgcaatacattcttccggcgaaatatgatatcttttctgatattctctgatcccttttgccttgtttgttccaaaaggaataaaatcaatccactcatttcccgaagtgacaacaacacattcttttccaaatctgtccatccagtatttcacagattcttctgtaaggccggccggttcaaacacagccagcttcatgataggatccgtcatctcttccatgctgtttacaaatctgcattcattttttacttcatataacatatggtcatgaaatctctttgtcttcggcatcagatagtggtaatcctttgcagaacaggtaaactcggcatccttcttttccaggattgcagaaataatctcccctgccagctttctgtcaaaagaatcctgatacagtacctctccatgatccactgccagtgcaccattctccgaaatataggaaatctctgaagcaacaggcgcaaacagctttgtcatattcggatattgtcttccactggctgccacaaacataatccccagttcctctaactgcctgatcagcgaaaaaatttcttcaggcagagactgtgccttatgtaaaagtagcgtcccatccagatcacttgcaaccagcttaatcatttccatgttcctcgcaaatttttaccagatctgtcggtttctcagcgacaagatctgctccattctcattcagttcttttcggtcacgaaagccccatagcgcacctactgtatacattcctgctgctttaccggtcttcatatctgtacttgtatctcccacatacatacattcttccggttttacaccaaatttctccgcaaccataagcggaccatcaggtgccggtttcctgcggattgcttcgctctgaccaactaccatatcaaattccccgtcaaaaagctgcgcaattactttcacagctgcaggatgaggtttatttgaacaaactgccagcttcattccatgttccttcaatttctttaaggtttccggcattcccttatagggaactactttatacatcggatctgcttcaaacatttcccggtaaagcttctgtccctcatcataatgcgcaagttccggatcccccgcatccttaagtgcgcggcggatcagcatatttgccccttctccgctgtaatatctgaaattatccaccggaagtgttttcaacccgaatttttccataataatattagtcacataagccatggaatccagcgtatcagccagtgttccatccaaatcaaatatacatgctttaatcatcttttgtcatcctcttaagttaattcctgatttcttcatttcataaaataatctggcaaccgggagtcctaccacattattgtaatctccgctgatcccctttacataaattccgaaaagtccctggatgccatagcttccagccttatccataggctctcctgtagcaacatactctctgatctcctcatctgaaaccggataaaaagtcacatctgtactttcataaaaagtatgttctgtccagactttttctttcttttcccatacagaaacgccggtatatacctgatgagtatttgcctgaagtttctttaatgtattcactgcatcctctgtatcatgaggtttgccaaggatcacattctcaaacactaccactgtgtcagatccgatcacaattgttccgtcggcactatctttcatagtgcggataacagaagctgctttatccgaagccagctgttttactgcctctcccggattgtctgagatacgattctcatcacctgatgcaggcagcacttcaaaatccacgccagcccgttccaacagttcttttcgtctgggtgaagcagatgccaaaataatttttctcataataacctcttctttcctgtcatagtataccttgtatctttttggtatgcaactgctttcattaactctttccataaaatttcgctttcctttttatctgaaaagtattaaaataacaataacctatagctgaataaaatggtgtcaggagtaaaagatatttttatcctgactcgctgtcaaaaataggagaatatcagaaaggagtttatgattatcatggctaaaattaataaatactggggatatgttgcaataggtgcccttacagcagctgctgccggtgctgtagctgcccttattgccaaaaaaggatcctgtaaagaggattttgattttgaagatgactttgatgatttcgatctgactgatgaaaaggaaactgctaaggaagatcaggaacctgccgaagatttccagtcctgggaacatacaggcgaacagtctgcaacagatgacaccgaaagcgaagaagctgaagaagctgctgatacagacgattctgagaagtcttccgataaagctgctgaagttgagattaaagatgcagaagaggaagaagatgccgatgaacccgagaattttgaagagactatggacgctgcatctgaatctgaagaataaacgttaccgttcacagtaacgtaaccaaaaaggaatgttacttcacgattatacaatcgtagaagcaacattccctttttattctgattatattactatttcagtctcattatgctttcggaagtttaaatgagctcttcagagacacgatacggttgaataccggtgcaccctctttagaatcatggatatctgcacagaaaaatcctgttcttacgaactggaagctgtcatagccttttgcttccataagtgctggttctacatatgcagtaacttttgtcagagagttcggatttacattcagagaaccatcttctttgttgtatacacccttctcctcgtctacgatattctcatagagacgtacttctgcttttcctgcctgacttgcttctacccagtgaatggttccttttacttttctgccatccggcgcattgccaccctttgttgcaggatcataagtacagtgtacaacacgtacagttccatcttcatcagcttcatatcctgtacaggttacaaaatatgcgttcataagacgaacctctgtgcccgggaacattctcttatatttcttaggcggatctaccatgaagtcttctctctcaatatagagttctctgccaaacggtattttacgggttcccagttcttcgttctccatattattcggagcttccagatattccacttcgccttccggataattatcgatcacaagcttgatcggatcaagaacagccatcagacggggacgtttcagtttcagatcctcacggatgcagtattcaagcattgcatagtcaacagagctgtttgctttggatacaccacagagttctacgaacatcttgatggattccggtgtaaatccacggcggcgcagagctgcgatggacaccagacgtggatcatcccatccgtctacaatgccttcctctaccaatttcttgatataacgtttacctgtaactacatttgtcagatacagttttgcaaactcaatctgcttcggcggctgtgggtattccaattcttttacaacccagtcatacagtggtctgtgatcctcaaactccagagtacagatggaatgtgtgattccctcaatcgcatcctcgatgggatgggcgaaatcatacattggatagatgcaccatgtatcacctgttctgtggtgagtcatatgagcaacacgatagataaccgggtcgcgcatattcatgttcggagatgccatatcgatcttggcacgaagcactttctctccgtctgcatatttgccttctttcatctcttcaaaaagctgcaggttctcttctacgcttctgtttctgtatggactttctttacccggctctgtaagagttccacgatattcacggatctgatctgctgtcaggtcacatacataggctttgcctttctggatcagctttacagcagcttcatacatctgtccgaaatagtcagatgcaaaaaacagtctgtcttcccagtctgcaccaagccatttgatatctgccttgatggattctacaaactcactcttttctttggtcgggtttgtatcatcaaaacgcatgttgaacttgccgttatattcctgtgcaagaccatagtttaaaagaatagatttcgcatgaccgatatgaagatatccattcggttccggcgggaaacgcgtatgcacggtgtcataaacaccctctgctaaatctttatcaatgatattctcaataaaatttttggaaactgtttcgttctccatctttttccctcctgttgtcgtattttatactgttttatcacacatctatatataaaaaatacaactgaatattttttatgtcgaatgaatttatattatcattggaaattccatctgtcaaccgtttacacaacagtgacaggccttatatttctcagacgttactgttcactccgttcacagtaacgtagccaaaattcattccagattgcctgcggcaatggaattttggcttgtatgtctcgggattttggcatattcatgccaaaacaccttgcgggacagtggtgtgtgaacagtaactctcagactcatctgcactctctttcagcagctcatatccttgactaacatcttgcaaaatattataattatatcaacatatcaaggaggtgcggcaatatgagtaatgcactaccaattgaagatttaagtaaaacttacctggaacattctatggttatcaataactttgttatcaagatcggcagccaaatcaaagacagcttatgtcgtgtctttggtgatggtgttcagtatgaatggcgtgaaaatgatgataaagtaatcattcctgacgtatcaatcatctgtaacctgagagaccgtaagaacatttctttcactggcattccccgctttgtgatggaagttttgtccaatgccacagaagaatatgatcgacatgaaaaaatgaatatttattgcaaggtcggtgtctctgagtattggatcgttgactggagaaaaaaatctgtagagatttatctcttcgatttcaaagaagatggcactggttatccgtatctttataagactgtcacagcccagaataaagaagatttacatctggttatgtttccgaatctgaagataacctttgacgagctgttcgacattggtgaatattaacgaaaaataaggcataaaccaaggaaatagtttactctttttatttgtttcagaatgtttcagaatcacttgcatattgatttcctgatctgcatatgctataatgccagtaggcgaaaagaaatagcaagtccatgtagacaaaaagaatgaagccctcagtagtgcgaatactgggggcttcttcttattttttatggcagacaagaaactgccaggttagtgttgccctacttatctccgtctaaccatttgcaaacataataggcagctatgcttgccataaaggtgacaagaaaagaaacagcaagattctccatatagacttcacctcctcccgttgccgggtatcggttggacaacactgtaagtataacatatctcttgtcattctggaagtacaaacagttcttagaagtttataaaataatactgggtttattcgagtatatcatcctaaaatcatcttcaggaataggaagagtctcagtacaaaaactgcaattctgagcagtatcccggaactgcaaattgcacaaaaaaaataatcagaacctatgtcctgattatcttgagtaactttgatttactggcacctcacaaacccagtaaataagctattcttagcaagctgatgacgggaattgaacccgtgaccccttccttaccaaggaagtgctctacctctgagccacatcagcattgtgtcggatttaccgctcacatttaaatatactatcagaacttgtttgtattgtcaatccctatttttaactttttgatttttatttttgggttttatacagatatctttctatttttgatattgctccaactgctctctgatcttgattcggatacgctgtaatgcattatctatggatttgggtgtttttcccatgatccgggcaatctctccgtatccgtttcctgccagataatattcaagaacctggttctccattggacttaacgttgctgttatctcctgctccagatcctggacattctcctggtcaataatgatagactccgggttctctccccagttatctccaagatgttcttcattttccccatcctgttcgctgagggaaatataggaattcagcggctggtgcttctgcctgttggaactctggatggcgttgtagatctgtctgtccacacatatactggcaaaggtctggaatgcagcatccctgtccggctggtaatcgcggactgccttaaacagtccgatcatgccttcctgtatcaggtcatcgttctccccgcctatcaggaacatggtccttgctttcttgcggaccatgttcttgtatttttccatcagatagtcgaggatttctgattccccgtttttgaaacgggaaattaattcttcatctttaattccgtcatactgtttcatcaatttaacccttccgtttttctgaaaatctctatcattcgcccagagggcttcttatagcataacaatattgtggaataattttctgctgcaaaaattcaagcagtctgagataaacttacttcttctgcagtctctgacgtacaatctcatatccaagtactccggctgccacagatgcattgagggaatcaatgtcacccttcataggaatagatgccacgaaatcacacttctcacggatcagtctgcttacaccttcaccttcattgccgatcactacgccgatcggacctgtcaggttaagattgtacatggtttcaccgcccatatctgcacatacaaaccacatgccctgttctttcagttcatcgatggtatgtcccagattggtaacttttgcaacaggtgtatagtttaatgcacctgctgaagtcttggcaactgtggaagtcaggccaactgctcttctcttgggaataatcaccccatgtgcacctgcaaggtttgctgtacggatgatcgcaccaagattatgaggatcctcaatattatccaggataaagataaagggatcttctcctttttcctttgccttcgtaagaatatcttctacacttgcatattcataggctgccacctgagcgatcacgccctgatgtgcgcctgtctcgcttaactgatccagacgttcttttgccacataattaataatcgtatctttttttcttgcctctctggcaatagtgcggaccggtccgtcctggcatccgtccaggataaaaagcttatctacacatttgccggaacgaaacgcttccagaaccgcattgcgtccttctatctgttcactcatatcttatcctctccaatccctgcacggaccagttctatgatcctgctgaaatcatcttttaaatataaatagcccatcagagcttcaaaccctgttgccctgcggtagtctgccatggttgcatgtttagccattgtaggagaatgagcattccttcctcttctgtaaacgctgtgttcctcctctgtaagcatgggctcgattacttccatcatggaagactgagttcctgccttaaccagactgctggcttttctgtgaagctggtttaccggacagttgcctttttttacaaggatcgtgcggatcaccagttcatagacgccatctccgatatacgccaatgtcagcggagaataggtgcgtaagtctttatcttccaaatgaaatacctgattaagcaaacctttcaaactacttaaactctcttcattaagcccgtttgtctcactcatattattcaagctcgcttccattttactccctcgcgggtatccttaaggatgattcccttagccagaagctcatctctgatctcatctgctcttgcgaaattctttgcttttcttgcttcctgacgctctgcgatcaggtcttcgatttctttatcaaggatttcttctgttttcacagccttcagaccaagtacatcgcataatttcaccattatgtcaagaagtgctcctgcaaattctgcggaacttgcctctgatacatttgtatttgcaaatttaaccaattcaaagattgctgccagtgcatctgctgtgttgaaatcatcatccatagcttcttcaaatttctttacgaattcctgtgcctgtgcaagcagttctttctctgcatctgttgcagtttctgtctgtgctgctgcttttctgtcctttaagtttgctgctgcatctgtaatacgttctaatgcattctttgcagcttccatcagatctgcgctgaaattcagcggacttctgtaatgtgcgttcagcatgaagaaacgaagcacctgcaggtcatactgttcactgatttcacgaacagtacggaagtttccaagagacttggacatttttctgttatcaatatttaagaatgcattgtgcatccagtattttgcaaagattttgtcgttgcagcattcactctgtgcgatctcgttctcatggtgaggaaagatcaggtcttctccgcctgcatggatatcaatctcatcaccaaggtattttttcgccataacagaacactcaatatgccatcccggacgtccgtcacaccatggtgaaggccaggatggttctccctctttcttcggtttccagagaacaaaatccagtggatcttctttctggtcttcaccggatacctgcagagaacggaagccggactgcagatcatccagattcttgtgcgaaagtttgccatattctttgaacttcttaactctgaaataaacagtaccgtctgctgccggataagcatatcccttatcaaccagagtctggatcatactgatcattccgtcgatttcctgtgttgcctgtggattggttgtggcaggttttacattcatgccatccatatctttcttacactctgcaatataacgctcggaaatttcctgtgcgcttacgccctcttcgattgctttcttgatgatcttgtcatctacgtctgtaaaattggaaacatagtttacttcatatcctttgtattccatatatcggcgtacggtatcgaagatgatcatcggacgtgcatttccgatatggatcaggttgtatacagtcggaccgcagacatacatacgaacttttccctcttcaagaggtacgaattcttcttttctacgtgtcagtgtgttaaaaagtttcatgttttattcctccagttttctctatcattaactctcttttctttcattaagaagacagatcgcctgagatgcaattccttcttctcttcccgtaaatcccagtttttcctctgtagtggccttaatgttcagctgagactcattgattcccattgcttttgccatattggctctcatctgtggaatatgaggtgccatctttggtttctgtgcaatgatcgttgcatctatatttccgatctcataatggtgctctctcaaaagcttcgtcacatgttccagcagcagaatactggaaattcctttatatgcagggtctgtatccggaaaatgttttccgatatcgcccagtgcagcagctcccagaagtgcatccataactgcatggatcagtacatctgcatctgaatgtcccaggagacctttttcccagtctatcttcacaccacccagaatcagatctctatcttcggtcagtctgtgtacatcatatcccattccaacacgcataatcattctcctcttatatccagcatcttgctgattctcaataagcttaaccgtctccttgtataaggagcaagtctgaggcttggcaaaacagccgattcatcgagtccgatatcataaacggttttcgcgcatccggctttctccagcaaatggaacatagtctgttcactgggaagctcatcaataatctcctctatcccgttcaggcatttttccagatgctggggtgaaatagtttctaacaattccggctcattttcttttcttatttcttccagaagtcctttttttccaaaagtttctttcagaagctcttcgtcctcattctcatagggttttgcgtgacatcttccctgtgtgatggctgcagcgatacgcttgtattcttccagtacaagaagtgctgctacagaaaccttctctccgtggagtgcatccagcggaccattgatcacttccatatcccacagatgtgtgacctggtgctctgcacaggacgcaggccttgaattaccaatcatctgcattgcaagtccggaaagaatcaatgcatacataagctgttcgcattcatcttcctctccctctgtaatatcctgaatcgaagatttcacagtttttaacgctttctcttccagctttacagtttcgcggcaaaaatactctccggtgaccaggttcgcgatcttccagtctgcaagacagatgtatttcgccatcaggtctgaaatcccggctgcagtcaggcgctgtggtgcttttgaaaaaatatctgtatctgcatatacacagatcggagctactgaaggcacagtcttctttactccatccagggtcattgctgctactgttgttacaaatccatctccacttgctgcggtaggcactgaaatgaaaggtactttgtaattatgtgcaatataacggctgatatcatggatcgtgcctgctcctactgcaaggatcaggtcaatgtcctcttccatgttgttctccacaatttttattgcatgccggtctgcctgaagtccctctgcatccagaacaagtacctggcatctgtcatagatatcctccataagttcctctgttgccgcataggtattggtatcgcagatgaccagcggggatatgtattctctgagcattccctctgacatctcttcttcaagcttcgctacagctccggcttctatcaaaatctctttcactgcaatctggtgttccctgccgcagctgcaaggtcgggcaaaatcgtccgcatcaactcgcatttaaattcttcctcctgactttcctgaatcaagcggataaaatcatccgtttgactatctgctcataattgaatagttgtttcacagcctgattcggttaaacttttttctataggcatagttcgttggtattatacatgattttcctgtaaaaatcaatcattccgcgcaggtctggcggctacaggttcaaataattatatacaatctttgaaatattctgtatgttcgtcaccgccgtactctccgggcagttttcagacatcacacataggatataagttgtcttttcgccatagacaattgcgatatcgtgctgatcctgatctgtctcgccggtcttgttggcagattttattccatccggaagtccctgggggattttccaggtgttttcctgatttgacagaagatttaacatttcttctgacgcctctttactgacacattcccccttgtagattttttcaagcaaagtgccgcaatccttcacagaagtcatgtttctgcctccaagactctcctgcgcagaagctgccggatggagggtatgctgcacacttgtctctgtatagccctctttttccagatatttgttaatatcctccgcaccttttttgaaatcaagggaatctgtctgaagcttcaccagttcattgcaggattcattgtcgctgactgtgatcatattccacagcaggtcatttaactttacatctacagtttttgtatctgcagtatttaatttctttgcctcatctgcctttacctgctccatgtcctcatatgtctttgccattacaaaggctttgatcagacttgcagaataaagggaagtatcattgatcaggatttccttttcttcattaaggtctttcacataaacactccaggttccctgatatccggacagcatcttctcaagctggggcttcagattatccatcccaagatcatccatattcacgatctttcccgtatcatccacaataaaaccatcatccgtcactgtgctttcctgaagcagggcgccatttgtaccgccaaaataatagcttccgtcaaaattcatttcataacagtccatctcaagtgaatggatacctggctcggttaccagtctgccattttcatcaaaataataatatccgttcagagtaatcccgtctattgccagattgtcaatataccttacctgcggtgctgctgacagacgccccagattgttcacaaagtaatatccgtcaaatttctctgccgcctgggtattctgtgtatcagcttcctcatctgtcttatccccaaacactgcaacacctttcagatgctccatatgaggactgcaggctttgaatttcccatctgtatcatggtaataatatccgtcaaatacagttccgtctatctcataatcctgaaaataatggatctccgcctgggtacttccggcgccattcacatccagacagtaaaatccgtcactcttcatcatatatttcccgcttccatctcccattggctgaatctgtgcctgcccggtgacagatgccaggctctgctgtgccgccataacaggaaccgccaaagccagtgccatggaaatggctccggccagacttccggctatgatataacttttaatataatatttcgctgtttgtctattttttctcatgcaaaactccttttacggtttcttttcacatcccattcacagtaagcaaagtatatattgttttattcaggatagcaagatttttatcttttttccaacaaagaccagaatctcagtatcagtgttcagttcttttctcttatcctgttccagaagcttcccagctgttcttccacagtatttaaagtacagtttcccctgtcagaccattcagcaggaaacagattcctgtaatctttccctgcaaatctctcgtccagcagaagtatgatccctgtgtcctcctgggttctgattacacgcccggctgactgcagcaccttattcattcccggatatctgtatgcataatcaaatccattcacaccctttttatcataatactgcctgaggatctccctttctgttccaatctgaggaagaccagtccctatgatgattgctccgatcagcttctctcccatcagatcaatcccctctgaaaaaatcccgcccattacgcaaaatcctaccagcgttccctctgatgcagaaaattcctccagaaattcctctttctccctctcattcattcccgatgtctgcgaaatacagcgaacccattccgctgaaaactcattctcatacacctccagaacatcctccataaatttataagaaggaaagaataccatataatttccttttcttgtccatacagttctggcaatgtaagatgcgatcctgtgatattcctcatatcctcttctggtatacctgctgctcacatcccgtcctgtgagaatgcacctgttctcccgcctgaaaggcgaagtcacataaatcccatagtcatcctttctggtgcttaaaagtgcacggtaataatccatgggaagcagagtcgcagaaaagaacaccgcactttttcccttttccagacatctatgaatatttgctgcaggatttacacagaaaagccgcaaaatcacctttcccccttctcccatttctgtataaaccacataattttcatccagaagttcatcaatgttcaggaaatctctcacacagaagtaaaattccagcagctgctccggaagttcctttccatgaagttcctccaggagcttatccatctcccccatcacctgaagcattcccagagaaactgctccgggatttggcaggatttcgaactctgtacactccttttccagagttcgaagctgtctgttcactttttccagtgctcgcaccagacctttgctgtaatccccggccagtctcttcgcctccagtacatccgctctgtccacatgagcactgtacatttcccttcccctgtccaccagattgtgagcttcatcgatcagaaaaatgtattctccggaagtaccctccccgaaaaatcttttcagataaacattgggatcaaatacataattataatcacagatcacagcgtccacccagactgccagatccaggcacatttcaaagggacacacctgccatttcttcgcatattccagcagagtatccctgtcatagctgtcctgcgtggtccacagttcaaaaacagcatcattcactctgtccagatgtcctctcgcccacagacagttctcaggattgcattctgttttatcacagaagcacagcttttccttcgcggtaatggttatcactttaaatttcagtccatgctcctttaatatagagaaagcttcttcagccacagtcctggtaatggtctttgctgtaagatagaaaatattttcccccagtcctgcaccaactgctctcactgccggaaagatcgtggacatggtctttcctactcctgtaggtgcctggacaaaaatctgtctttctgtggatatagtgtgatatacaccggatacgatttttcgctgtccctcacgatattcaaaagggaactccagatcactcatggacgcattccgttcttttttccatgcaagctggtatgcgatccatttatgatacctgtccagaagcttctggtaccacagcccgagttcttccagcgtatattcctctctgaaaaacttaagctcctctgtgtccagattcccatatgtcatctgcactccgatcttctctgctttctgttcctgcgcatagatccaggcataacacattgcctgtgcgcggtgaacctctacaggcttctccaactgactgacatctgcatagacacccttgatctcatcgatccagcactgtccatcctctgtaaaaattccgtcagccctgccctctacctggatacttacatcttcatattctgttttatatttaagagaaacctccgctctgtaatggcttcccatcctgccctgtatttttctgtgcagtctgctgcccttctgcattgcttctctgtcagaagatcctccccggttgtcaagatccccgcttcttaatataaactccaccagatttctgacggaaatacgaaccaccggcttatccatatcaaaacacctcacgcaacaatagctatcaaatagttacccaacatcgtccgttcattataacacagaattcatcatcatgtaaaaactcctgaattcaagaaagaatcctgcaagcaggattctccgcctgcaacaggtcgcttcagcgacataattccgctccgtcgcagtgcgatcctgcccggagggcttttttatgttataggaacattacggggtaatttcctataatataaaaaaccgccagaaatctctatactgatttctgacggcccattattttgtttatcttataattggtaaaaatcatatccaccaattgctccgctgtgaaggagctcctgcaattctcaattagatctgggtaattacaaagatatcataaatagcctttaccgcagtctcaaaatctctgttctccacaccgataatgatattcagctcactggagccctgatcgatcatcttcacatttacatttgcatgagcaagtgctgagaagattcttcctgctgtacctctggtggatttcataccacgtcctacaacagcgatcagcgcaagatcagattccatttctacgaaatccggctgtactgcacgatggattcctgcgattacctgctgctctttctcttcgaattcatcctgatgtacatatacagtcattgtatcgattcctgatggaacatgctcaaagctgattccctgatcttcgaatacctgaagtaccttacgtccgaaaccaacctcactgttcatcatggatttctcaatattgatagaacagaatcccttcttacctgcaatacctgtgattgtaaatttcggtttcttgcatgtgctctcaacaataaaagtacccttgtcttccggtctgtttgtgtttttgatattgatcggaattccctctttacggaccgggaagatcgcatcttcatgaagaacggttgcacccatataagaaagctctctgagttctctgtaggtaatgctctcgatcacttccggatttttaacaatacgcgggtctgttaccaggaagccagaaacatctgtccagttttcatagaggtctgccttaatagcctttgccacaagggaaccggttacatcagagccgcctctggagaaagttttaacttttccatcttcaccagcgccataaaatccagggataacggcacgctcacattttgccagctttttggacagaagtctgtctgtcttctcggcatccaggtttccgttcttatcaaagcggatcacatctgctgcatcaacaaattcataacccagatatgctgccatcaccttaccattgagaaattctcctctggatgctgcataatctgtgccagcctgtgccctgaaatcagcttcgatctgaacaaattcatcttccagagaaagatccaggttcagtccgcggatgatctcataatatcttcccttgatctcctgcagaatcggtacgaaatcctccccttcaactacagtattataacatttataaagtaaatctgtaacctttgtatctccgtcaaatctctttccgggagcggacggaaccacataacgtctgctctcatcacttctgatgatctcccctactttctgaaactgttctgcatttgccagagaacttcctccgaatttaacaattttcttcatttttcctgctcctcatatgtcactaaatattttcagaccgatctcccatcagtctttgtcactctaccaacataaagtctgtttaatattgtattgaataaacgccaattttgcaagcctttcttacagaaatatccgaaaatggttattttccacaatctgccgaagattcctgctgtttttttacaaattctgtcacattataaacacgaaggatatctccatccacccgaaaatgaatatccttctctccaaaaggcattccgtaagaccgttccggatcattctgataagcaggacggggatcatctgcaagaactgcgatcagagcctctctgctttccccgggtattctttccagaagctcctggggaaattctacattcagatgatgatctttggaatattcggtaaaacttcctgttgcttccggatggcaatccgcataaggaatatatggtttaatatcgaaaatcggtgttccattcatcagatctgcaccttctacataaagtacagggctgtccggctcatccagagctactttctcaagcttcacacaggataatcctatggaattgggacgaaagggcgatcttgtggcaaaaactccttttctcacatttcccccaagcctgggcgggcggacagtcggtgaccactttgtcctctttgcctccgaaaactcccagatcagccagatatgactaaactcctccagaccacgacaggcatccacattgcgatattccggttcgaatacgattctcgctttaagcgcccctacacggccactctgcctgggaataccgaatttggttggaaaattattttctatatgtgcgattggaaccattgtattattctccttttgtaactgttcagtaccttcacagttacgagtcaaaatccacaagaaagaatcctgcttgcgggattttggcatgttcatgccaaaacacctcgcgggatagtagactgctgaatagttacgaaatatcttttataatagcaattttagtataatcaagtcctgatctatgtttttgcgaacgagacgatttgcgaaagtgatatgcatatttatgggaaatctctgttctatatggaatgcatataaaatatccataatgactttgaataagtaaacaagcatatcttctttcctttttctttaaaagttctttatatggcggattcggatatttctcgtaaaattcatctgaaaggctataaacagcatagtcaatttccaattttcttctccttatatacatataaacgagagggaaaatgaactccctctcgttatactcttcgctcggtcatattttattttaccgatgagtcagaaccgtcactcatctcatcatgcgaatagagaattaactctctatatattgtattatataacatattttcttaaatagcacaatcctatatttttaatttttcaaacacgctctaacatcgtttctgttcacagcaatatgctttctaacacactggacttgtgtgaatttatattatttgatcttagcgctctttgctttagaatagctgctgtatattcttttaccgttttcggtacgatatgcccgcaccttgtaatagtatgttttcttagacgtaagcttcttatttatataagaaacagtgcttccctttttaatcgttgatactgccttatatttaccggatttggatgtggcacggtatactacataccctttggcaccgcttacctttttccatttcagtgtagcctgtttcttaccggcagttactgtgacagccggggttttcggttttactgtctgtgccggagttggtgtcggtgcaattccattggttgttacagagaagtttttgtcataactgcttttaatagcaccgccccatttggtggaaacagcctgtacactgtaataataaggagttgacggagaaaacgctgtatctgtataggagaggtctttgaccgtagcaatctttgcgaatttgctttcacccatcttacgtcttaaaataatataagaatctgcattttcatatttattccaagtaagaagaactgtatttcctgccgccttgcaggttgtgatctctggcattcctgctgcaaagaggtctttcgcagtaccctttacaactacatggcacactgcggttacattctgatctgtttttacacggatatcggtttctcctacagaaacaggtgtgataacacccttctggtctactttggcaacgcctgcattatcagaggtccataccagttccccgccgcttcccttcggactgaatgtccaggtcagggtataggttccctgatcaattgccagagtcagcgttttgtcactcaaagcaatgctctgtgccggtgctgtaacagtcacgtggcaggtgcctttcgttccattgtccgtagtcagtgtaatatctgcagaaccggcacccacaggagttaccttgccggagccatctacggttactacagaagagttggaagattcccagtacaaagaggacggttttgcgccgtttggcgtgatcgtgtaatccagtgtcctggaaccgcttttcgttgagagattcaggctggacggagaaatactcacccctgtcacactgaccggtctggaagaaacggaaatattgcaggtcgcatagacacttccggaaactctcgcagtaatcaccgcagaaccttctcccactgctgttaccacaccaccgtttacacttgcaacagaattgttggaagaagtccagcttacagttcccaccgcatcagacggaacaatcgtataagtcagtgtatagctgtctccctttgtaagagtcagatcagaagcatttaagctgatcagcttcggtgctaccggaagctttgactcaatacttttaagcagctgaaccgcttcataaactctgtttgcagacgcatccagcgtagtcagcgcactgtccgcttcggcatatgcaccggagaatccgctgacctgggaccatctggaacgctctgcatttgcctttcccatcatgcggataagctcgctcttatctgccgcctcaaaaatctgcctgttattattatacgggtcacatcctgtaatgtccgtaccaccgcaaagggcaaacataacacgcaggacacttccgtctgacggatgactcgcacccattccgacacccataaatacattatccagagtatacgtccatccggatgcggagcagtaggaaaattctgtcagatccggtgcatatttgttatcagtaagcttataggcatcaccggtccaggtggaagtctcggagagaaccttctggatacatgccggtggattcaggcttccactgtcacagttggcaattccccttaagtagaaaccataacttgtatttgtgtcataaagcggcgtaatcccgttctcacttaacccgcggagcagaacatctgcacaggtttctcctttcgcaaattccacctgtacaggatccaggatcataccctggccgatcgtgttcttctccacagtcagcgtcagggtatctgccagaacatcggtctgtcccagcgcaaaaatccccactgccattccggctgcaagagtcagccccttaatggcctgccatagcttattctttgtcatattcattttcctccttattttcgggccgctgcagcagcccgtattttctttttactctctccagtttctccagcagaggcctgcttaggatccacagaaagattaccgtagaagttgcctgcaccagatctaccggtgcacctgagatataaaacgcgatcaggctcttctttgtgatgtatccgtatgccatcagaatagatgccggattcatgatcccgccgaagatcagaaacacacttaagaatccgtaaatacacagatccaccttcctggctttgagaatccctttctgaaaaaggattcctgccagatatccgatcattccataggaaaacatctgccagggtgtccacggtccctgcccgaaaaacatatttgagatcatcatgatcagacaggcacacagaaaccccgcctcaccacctaaggaaaccccggtaatgatcacgatggccgcaatcggcttaaagcttccgatcataaagaaagcactcctgcctgcgaccccaagagccgccattacggcaatgaccataatctctcttgcctgtggatgccggccctcaaataccataaagaacgggatcgtggcataggcaagtattaaaagactgatcactacatcatgcttaccatgaaacttatgaaccaggataaaaagcaccagcggaacaaaagccagaaacataatcagaccaatccaggtacgcttctcaatctttcctttatggatcggctggataatgattccatcctctttcagttcatattcctctaattcctgtccggattcctcttccccgggcaggctctgtgcacaggaatccccgaagaaacggtccataaactggtctaaagccttgccttcaagcacgcagccacctcctttccggtaacagcatcaggaaaataatgccttgccatgcgattggcagcagtcgtataaaagctgtttcccgcaaagaaatcccttgcactcttacacgtcaccacatttccctgaaagaacagtccgaccctgtctgcatattctgcgacaaactccacatcatgcgagatcataaagatagtgatcccgtgagctttgagcttctttaaaatgtctcccagttcctgtttatattctgcatccagccccttcgttggttcatccatcagaagaagcctcggctgcaacagcagaaccttagccagtgcaagacgctgctgttctccaccgcttaaatcatacggatgacggtcaagcagtccttccagtctggtcagacttacgattccctcgattgcctctgccttcctcatattggcagtgtattcggaagatttcttctcctttgccccaccgatgatagaatacagatcctccctgactgtcttcttgataaacatgctctggggattctgcggcagcacgcccagataccctctgtaaagctgggtatccgtatacctgcggatatcagtcccattcaggaaaatcttgcccctgtagggagcacgaacacgactgatcagcgataaggtcgtacttttccccgttccgtttccaccgacaagcgcataaaattctccctgctttacttccaggttcagatcctgcacaacatcctttccgtctttttcataacgaaaccacacatcctttacctcaatagccggtggcatagagcttttggaaccaggcagcagtttatctctgactgtattcagctttttttgcagtttttgtttatttttacaaaaataactttcttcacaaacagaaactgtatcagaagctgctgccatcacctgtgtgatccagttccttccctctcttacagtcagcggacatggcagattattttctacctctgcatagacctgcatgggaaccggcatggacagaaacattccatgatgttccctcttcaggaactcaccgatctcccgtggcgccccctgcgtgagcagactgcccttatccatcacatataccctgtccgcccacggaatgacatcctgcagccggtgctccgtcagaattatggtagtgccgatatcccggttaatctttctcaccgtttccagaaaatcagaagccgcgatcggatcaagctgagaagtcggctcatccagaatcagaagtttcgggtgcatagccatgatcgccgccaggtttaaaagctgcttctgccctccggacagctccgagacattcttataaaaccactgatgaatcccgaaatagcttgccatctctgccactctcagacgaatcgtaggcgtatcatatcccagactttccagaccaaatgcaagctcatgccacaccttatctgtcacgatctgattttcgggattttgcagtacatagccaatttcctggctctgctgccggtggccgacttccttcaaatcccgcccataataacagattttcccggaactgctgccaaaaggagccagatccgacttcagctggcgaagcagcgtactcttgccacagccactcttaccgcacagcacattaaaggtaccctcctccacatccagtgacacatgagacagtgactccctgctgccattcgcataacggaaggaaaaatctctcacttctattatcttcatctcgcttctccttccatatcttcataaatctttctgtaggtcactgccatctctccctgtacgtggcttctgcttttcttcatggcagattcctcacacagatccagaatcagcggcagaaaacagaacacaccaaagctgacaaatgtgacagcagccagcagcggactgcacgactgcttcggaacccttccgaaaacagtaaaaccggcaagcaggattctgggattgtactgtgcaaaagtagctccccggtaacatccatatccgaaaatcacacaaagcccgacaagcatagttcccagtagtttatcccttctgttaaaacggtaaatagaaaaagccgtacgtcctcttaacccatagccacggcttttcatggaatcagccgtctcaatcgcattttccagtgcccatgtgacaagaatggacaccatatttaacgcataacggatcttcttaaaccatttgccattgctcacatccatccccacgcatttctgtccattgcggatcaccttcagctgggccataaagtgaggcacaaaccgaagcgccatagacagcatcagagacatcgcagggataatcctgccaaaaagatagataaatttatcacttgtcatgatctggttatagcaggagaaccacaaaatcataataaaaagtacacatcccagaacgattccatataccattgcctccagcgtaacccagtttccgctgctttctatataaagaagcggtgtgactccgtaatggttaaacatcgggtttaagagtgccacgataaggagactcggtagcgtcagaagaaaattgattttcagaaccttctttactccgttaagccacatggagtaagctgtggcagccacaaaagagactgccaggtaaaccgggtgctggataaacatggtaaaccccagcaccacggcaaaataaaagaaatttaaaacaggatggcacctggaaaaagcatcagtcataatactgatcccccacatccctgccaagattgcaggtataacgccattctaccgtatcgccgtcctccagcgtatatttcgagcagccataattcggataccagccgttgacacagtacatccatccggaatccttgccacagtcaaactcatacaggttattgataccggatacataataactgttatacataggtgtccactccgactccatctgaatactggcctgattacatacacgcttcagcacatcaaataccgtctccccctcatagaactccacctccgaaggatacaggatccagccgtccgcaggcacaaattctgccttggactctttcagatcatcccagttattcaggatcgtagaacactcgatagagaaagtacaggtcatggctgtatctgagctgtcatcgccaccggaagtgtctgtattgcctgttccatcgccggaagagtctgtctgtccggaactggtatttccatctgtgctggactgaccgccagaacttccagtggaattttcaccgttttgtgtatccttattatcagcagtgcccttggatttgtcatcggattcatccgtagattcacctgtggtagaaccgccgatcagatagaaatctcctcctgtcttagtcacgttaaaggtaagtgttgtgcgctctgtttttttctttccggtttctctggtagtaatctttgcagtatcaagctgataaagctttccatcttcttccagacagtaaagaaccttatccgcgtcccatttttctttcagattcagggtcagcttcgcaggcgctgccagattcatcttctccagtgtgactttcaacgcataaggcgcatcattggcaagcttctttacctcttctgttccatcttcactgcactgtaccagaagtttttgctccaccggattctgaatctggcttccattgtaagtccatttataactgatcccgctgtccgtttttccggtaaaataatacttttcgtcctttccggcgatcgtttccatctgtgcctgggtgatgattccgtcctcaggaagctttgttttctgcttcaaaggttccacatctgtatcagaatcttcctccgtgctgtttaagatctcagctcctttttcggaaagctgtgtcatgccgtcatccccgccgccacaacctgagagcgaacttacccccagaaacagtgcaagccacagggcaagtccctttttctttatcctcatttcttcttcctccgcttcttaataagagccctcactccggccttaatgccgctgcctgccagtcctcccgccagagcaccgcctgccgcaaaaccaaagatcataccatattctttcttctttgaggtcagacttccggttccactctccccggcagtttcctgatatccatcctcaccggtatccatctgtgaagtctcttccgactctgtataaggctctgcttcgaaatcccagccgccggaattcttatcctttgatgacttactgttctttgatttactgtttttagaatcctttgaaccggagccactatcctttcctgagctttcggaacccgtggagcttttgctgccggaagacttaccacccagagatttcccggatccacccggcgttttcgtattgccgcctgacggtgttgtggcaggaaccggcgtcggggtaggaatcggcgtgggttctttcagaccggtaccggaaccatctcccttgccaccttttttgatactcacatctgacatatcataaaggctcgtcttgccatccttcaggcgctggtaggcaaccagtgcgtaatatccctgctccgtagccatcccgtccagagtgcctgctgccgccccgccgttatttccggcacccgcctttacatgcataaatccacttccatcgatatgataggaaagaagattctctattgtccagtggccgcccttgatgaaacgcgaatccgtctccgggtcaatcccaaggctgcataaagccgtgatgatctgtgcacaggactcctctgtctccacacccatcgtggaatatccaccgctgtcgttctgcatttccgacaatttattcagccctctgtcaatggcagcagtcacattctcataacctgatttatgataatacggtgccagcgcctgcagtgtcatgccggtaatatcagaatccgcattacttcccatcagcgtccatccgccacccgggagttcactctgcagcaggaaattcaccagcgcagattccgaattctgctccttcgcagacgggttctccgggaaagaatattccgggtggcagttaagggcaaggagtgcccagatcggaccgtttaatccctgttccttcacaaggctgaaatcagagatatattgaaatagattgtaaccacccacattgcgggcatccttcccctctgaggtcaggaccaggattctcttggaatactctgtatatttggaagtattggtaaggattcccttcttttcctcgatataatttgccgtgtgattataataggtagagaaatatttctccttcaggcttaaaccgcctctcgccagtccaagcacataccattcgctgccaacagaaggattggtatctgttgcacgcatataggcgctggtctctgccataacctgactgaccgatttcttcagggcatttgctccctgcatgaccgttaccttacaggaggccgtcatttccggatgttgtgttacagaagcggtaatcgtagctttgccattctttactgctgtgacaactccctttttgcttactttcgcaacagaagtgtcactgcttttccatgtcactgtatactcttccgtaaccgattccggtaccgggaccaccttcagggtgtatttctgcccccggttgatcttaacggatttactgttaagagagattccctgaagtcctgcggggaagtcagcaatgatcagatggtttaaagttctggcactgtccagatagaagcggttatcttctgtcgtctgaggggtcagttccataaacgaatccccggtacttctaagaaccctcggtttcgtcagactctcatatccatccgggacaagaaatgtcagagagatcatcgtcattggctgatagttttctcctgtacggatatccgtataggaaatatttatatcataaagaagctgtggaagagtccccggatatgcttcggagagctcctgtatagtctgttcctgatccgggttctcctgcacatgggtctgcacataccagggatttcccgtggcggtcactccactgtcagaagaaatcagtgccgcaatacggtttcggacagtttcaagagcctctttgactccggcatcaatttctgcctgctcctcttctgtcagactgtcataggtgtcactggcaagaaagaacttcgagaccgtttctgaggacagatcaatttcttcgagcgccgctgcttcctgaatacaggaaatcatggctggtatatccagcttttcttcaccggcttcattattttcttcttcatttccggccgcgccatcgtctgtctctgactgagatggttcggtgtcagactggaattcattcgcagtttctctgtcgtcagaatcatcatgctgtacagggacagaagtttcttctgcctccccgtgtatctgctcagccggtggcatctgggctgcgggtacaggacatgcggtcacagcaattcctgtactgagaagcagtgccatccattgtttattcatttgtttcctccgcgtttttaatctaaaaaattacatccgggtaaaatagcacccgcaattcctgaaattacaaaatgacagatgactctccccctgtcatatagcaggtagaaaggacatctgccttatttttttgtatcattctttccaaattttgcagcaattatcagagcgattattacatttatcagaaaattccatccataagtatctttccatatgtttaacaggcagctcaaatctgaaattttattgtggaatataaattctcttgatataaatatagctgccaggctcgccaaaaacattaatgaaatagtcagcaaaaatatttttattttattcatatatataaattatacaggataggaatctgtagacattttatattcagaaactaattttgttcttgctgaatctgaatatatcgatataatcacgcgcaattttgaaccatacatagctgtaattgaagtaccatatccctttttttgaatttactgtaatgttcctctatacaatcactcgcataagaagaaattcccgctccaattgctgttccagttgcagttaacacagcactacataatgcctttatagttttcttttcggtagatacattaaatgaaaaattatacttagcgcgcttccattgattaaattcccgtgattcataattatcagcgcttacaatatttacattgctatcatttgcatatacagtaactgtaaaaatttgcaaaatcatacataaaattataattataaatgcttttttcattctcttatcttcttttggggtatgcagtgtgttgataacacactgcatactgattttattatttaacagttacttttttaatctttgagaaagagccataaactgcttttccgtttacttttctgtaagcacgtactttatagtaacgggtctttccggtgaggaggctctcgtctgtcgcacctgtacctttggtgatctttatgcgggtataggtaccattttgggaatcgctggcatatacctgatagccatcggcaccctttaccttactccattcaagcactgctgtctttgaagttgagcctgcggacagggtcggagcagaaagtactgcctttgctttctctgttgctgaatagcttccgtatactttctttccgcttacattgcggtaagcacgtactttgtaataataagtcttaccggtaactgctttcttatctaggaatgtaactgcgctgttctttgcagtggaaccaatcgctgtatacttgccatcctttgaagtggaacggtatactctgtatccatttgcaccggaaaccttattccatgttacgcggatcgtactgtagctttcagaatttgccgtagcaatctttactttgccaagtctggcttttcctgcaacaccatctttgtcatagctgcttacagtcatctcgccccatgcgtaagagtacgccttaacagtataataataggttgttcctgtaactgctttctgatccttataggaaatatctgttacccgggatgcgatcttcttccatccgctgtctgctgttctgcggtataccatgtatccgtctgcgttatccacgctgctccagctgatctggacagtcttatagttgattgcctttgtctgaagatctgcaggcatatctgccttaaatgcaccctgtttgcccgcaagttcaatgtggtaatctgccacgatcgtcttgatcagccctaactgcttcgcattccacatataggacttgccttccacactcatgccgtcgatcagcttctgaagtgctgcaagctctgcttctacatttgcaatgttctctttggtaacagcagtcggaagattgctgatccactcatctgcctgctgtgcatctgaaatgtccttacctgccttgtcagcctgtgccgtcagtgctgcgataacctctgcaaaagtcatctcctgactgccgactttgactttcaggcctgccatggcatcttcctgtccctgataatccttagcataacggtcaaggaaagccttaacatctgcgtaggaatctctgtctaccgggtgatcttttactgttgcataaatctgtgctgcttcatctgcgaagaactgctgatatgcactctggcctttctcataagtcagtgccatggcaagaagcttctccatattctcaaccagtgcggtgttctcgcttctgaatttcttctcttctgtttctgttaatctgtcataagcattcttggcttctgcaatctgtttcagctctgcttctgtaagttcacgcttagaggtatcacctgctgccggaacttcttcatcagaggagaaatcaacatctgtctggacatcttcagtatcttcagctgattctgcctgagggatatccactgtctcagctgcctgctcatcaacttcatcactgctgaatgcgtccgcacttccatctgagaaatcagatccctcagactgtgccggtaccgcctgttcctcttcaacagaagctgcctcctgtgctgatggaactgtagtcggctgaggtgcctcatatcctcgtactgtctgcgcatccgggagtgctttaagcattgccttgagcgcatcggctttcagctggtaaatataaccttctgctttctccagagaagctgtatttgtaacctgggctttctgctggtcatcaagcgtatcatacaatgctcttgcatttaccacataagccttccagtcattccagattttctctgtcggaacattgttattcttctctgtcagtctcagaggtccgtcagaaagagcacctgaagatgaagtagtgatattcagttcatcgataaaggagatcacataagcaaccttctcatccgtactctgtctgctgataaacaactccgctttttcaagctctgcatagtttgtcacacgcttcttctgatctgctgtcagggcatcataagccgttctggcttccactacaagagcctgtttcttcagataattatcggaagtaacctcgccgattgccttgatcttatcaacaactgcagccgcagccttcagatcaggaatcagatttctcagatactgtaacgtactgtaattcgtaaccagagctttctgcgcatctgtaagagcattgtactctgcctgtacgcggtcaagaagctgcagaacatacggatcaagagtcagttcagaagaagaaggaagcgcatcaatatcagcgataaccttctctactgctttcttatccttatctttctgctcctgctgtttctcaagttctctgatcttagcctctgcttcagtcagcttagagtaatttgtaattacagatttctcttcatcattcagtgaatcataaagagttcttgccttctctacagccgccttgtcatccagtgtcagcttatccgctgccggaatcgcattaatggctgccatagctttttcaatagaattacctgaaccagtctctgctgcaagaagctttctaagtgtatccttgttaaagattgccttgtgagtttcgtctaatgcttcgtaagcgtctctcgcttctttgatctgctttttcgtactgtcatcgttaagggcaaggatcatgttgttaactttttttgttggaacagttacgtctgtaaattcccagaagctggatgttttttcatattgtctgataaatgcatccagaccacgtgcaatctgcggaacatcataatttgtgaatccatgaatacttccgtcaaaaacaccatctacatctaccagatcaaagaatgcatcaagaatattgtttccattcttagtatatccactggaagaatctaaaacatttacaccaaacgttcctgcaaaaagcattgcctgtgcatcattccatgcgttgtttccataagacatacatcctgtttcaaatcctggtgtacagaatgaacctgttgaacgttgtgcaattgctggaagcttatgtaatgccttgtctacagcttctgttacatcatcgtaaccaggctttttgtaccagaaaataagtggctgccatcccatggtattgtcggcatttgcaaaaattttgtcttcggcatttgacaaagcttttgctgtatcatgtgcccattggttaagttctgtatctttaaaagtgtcagcggtatacccacctgcttttattgcattaatagcatatacagttgtataagtaagttctgtgctttttcttgatccaactgccgaaagaaggtctacagacgaaatgtcccttggatcatatccaatagcttcaatagctaaaattaattttgaaagttctgttgtcttccattgagaaacatcagttccctgatttttaagtaactgcaaatactctttggtatttgcaaaccatttgtcaaaataatttgtatctccatatggaatatagccgcatctagctgctgtaaaaatggcccaaatatctgtattttcataggatggggattctttagatccaaaggcatttttattttggcaatagttcataataatgttacaagcctttttagctttttcatagtaagatggccaattacttggattacttgagtttcccttagctccattgtctacaacttcaccagtaccgtcaactacttcaactttgaaactatacccatcttcttctgcttgtgcttcttttccatctttaaatttcaaaataggcatattaatccattctacgcttaatggacgttcgcctaaaaaactcgtatcaattgtagcagattttatatctttctttacatcatcagatggcaaaactacttctataccatatttttcaataatagattgttgttcatcagttaaatctgtaaattttacacctatcacatttacaacattattattaccgtcatcgtaaatattctttttttcaccatttataatatctacttgatatgggaaatgataatttttagcataatcaacaaaacgattataatctctgggtacgcttgtactccatactttaggttcagtggaagcctgaactttaagagttatttcttcggtttgtggattataatatggatagccattattatcttctggggaaatagtccattttttattaaagtcaaacccttcataagttccctggtttttcatttcagacgtagttttgccaaaatcagcataattaggaaactctttattattatctctatttgtaatatattcagacatgattttaatgtctggcatattttctttatcataataacaattggttgcacttgctgacgtactaaaaaaactttttcgtgtaaatgaaacacatagatatccccatgtattatcttttattttgggttccagttcatctgctaatgactttattgcttccgaatactgtccatatcctatacaattttggtaagttattccagtattaattgttcctaattgacaaaattcaaatgataaatcattatcaacaatatcgtcagctatttcttcgattgttttttcactctgcaaatcgtaagttattgctatggaagaatccattaaagttccgtttccctcgattgcacctatataaacatctgtatcttcatcgtcataaatacaagttacgtttcctttaattgttattccttttgcaattccatcacatcgcgaaaagacagtttgaaattcatctgtttcgctattatatgcatatgattcatcaatttgtacatttatattttctacaattccattgtcatttatacgaaaaggaaatacagcaatgttttcttttgcttcttttgaagcatatgtaatggtgtgtccttttccgttcaatatgccgccaaaactagatgttgcttctggaacatctgaaatgtcaatgtcattacatagtataaccgttttattattataattttgtatattttcgataaaattataataatcttgttctgtattaatacagtatttccctgttgaatcttgtgataatatatctgaattagcttttacaagataggcattactaaataatagaaaagctgagaatattaactgatataagatttttttttcttttttctttttcttcatatctatttacaccctaaaattaaaataatatgaaaaagaactaatgctttataaagtgaaactttataaagcattagtatcttcatcttttttatttgctattaaaatttactttatttccaacccggaacctgaatccactgatctccctgctgaacataactggaaaatccaagatctaatcccatcatcatagaaaaatctaagcatacagtgtgttctttagtgtcggaaagtacagtatcaacacctaagttatctgtattaccatcaataatagtcatccaacctgaataattattatagtctttctcagaaagccaatctgttttatgtactatattgttccaggttgaattttttgtaaccttcatgctttctgtttctgttgtattaagatttgataatttgaaatattttcctcttccgttagcaagagagtttgctgttttatttgctgtaccatcatctgcaaatactttccctaaatcgctattagcatgattttccattttaacagctggaatataatttccatactgactatcataccaacttaaaactccttgataatgataagttttaccatttaaagtctcttttgtttcagtatcagatcccgaaactgctttcagaacatctagtgcagtaacagaaccgttggaatttgttactgtaacaactttttctggcacaatgtctggtgacgcactattttttcctgttaaaccagttgtctttatagacacttttgcagttactgtatctgccatagccggtactgctgtgcttcctaccattgttgttgccattaagaatgcaatcacgctttttcttactttcatgttcatttcgtttcctccttgaaattaaaatatagtttgttcttttgcaggttattctgcaaaatatatcttttcacaatcattcagactgcgttgatatctgttttccctaaaaaagggtgcaaaaaataaacctctgctctgcctgcatatgtccattcttcattttcacacacactctaaagcccgtctcctgacttaaagttccagagtatttttcagacatactctaacctacttactgcccttctcagaaataatttccaatggcttcgcagtgttcgtccttattacagtggggatgaaaccgtaccggtatctcaccggatttccaaaagctaaagataaagagataacgttacttccgatattctgttatcaaagtgcaaaaaaaatccctgccggattcggcagggaatatcaatgtacaaaccaagaatccactcctatcctttatattaaagtatcccttatgaatacttctacaagaatacagtgaattgcagactgaatatactacaagggacgaaagccctgtttgggattctcacccaacgattcttcaatcattaccgtagtaatgagctgtacatgtgcgctaaacgctattcgttttttacgaaaccatcttaacattttgtccataatttgtcaatatcccgattacaaataattacttcccttattatccccggaatacgtctgagaaaacactcttttacagaatctccacaatgcggaatatacaaatcaaaggaatgatcttccacacctcggttctaaagtccatactcatcataatactgcctgcgctttttagcatctgtcactacgatctgaatctcatcatttctcttatcaagaataagtttattaatcaaaacactaaggcgttcttctcctctgacttcgccaattgctttgccaatagattcgccaattgccttgccacgcgcttctccaatagattcgccaatcgccttgccacgtgcttccccttccgctcttaacctttccgattccagttccaaaacttttccacccatagcatcacctatccctttctggatcttctcttcatcctggaagatatagtccgagatttttacaatcagttttatcagatccgtatataattccgaccttccagatcctgtcagttccttgatcgagtaggagacggcttttgccgccgacctctcacaccaccggacatgcggttccgcatccggcggttcagttaacttgacatctcgctttacaaagatattcctcggctgagagtaaaccaaatttcttcaaacgtgcatttgacatcgcataacaaacagtttttgtacggcacactcgggcatatccatgaaatcccgccgcacaccttgcattctttttactaatacccagttttaccaaatttttatatctggtttttggatttttccagtgtttccatatgcacattctgaatctatacctgattactgtatcaagttttcgggttactgtaagaattgagccaattttaaagtaattaatccatcctcttactacctctgctatctttttcgctttgtatgaattactcacgctccacttgcggctcgtaagtttcctgactttcttcattactttatccaatgactttttcggaactttcatcctatatttcttttcctgaaattgataataaaaagcaaatcctagatattgtatttcggtaggtctgcctattctactcttgtccttgttcacttttaaccgcaggacattctcaatatatttcgtgactgatttcattactcgtgtcgcagctttttcacttctgacaagaataatacagtcatctgcatatcgtacaaatctaagtccccgactttcaagttcccaatccagttcatttaacagtatatttgcaagaagcggcgagatatttcctccttatgacgagataaacgttatgacgagataacgctgattatctgcgtaaatacggaatttctttaaatttatctcggcataatacaagcaaaaatgctacactttgttattctgtaatcataaaaaaagaaaggagtcagaaactcatgaatcttgaaatgattacagaaggactaaaacaactgttgcaggaaaacaactattcttctgcaaccatccgcttttatgaaggtgaatggaataagatccagtgctttcttacggaagagtacggaaataccgaatacgatatggaacggggacttaaatatctcgaaaaacaatacggcttcattacgaaatataataatggaacgctttcccaacagagagtccaattgctccgtgttgtgcatatgctggaagattaccgtttgcatcaggtgcttaccagaagatactatgcctcaaaaaatcctattacgttgaatgcgtactatttaaatttatatacggattatttagattttctgaattctacggaactgtcagcaagtacaatcggacattataaagggatttccagggcttttatggactatcttcagcagaggaagattggaactatagaaaatatcactatggatgtttgcaattcttatctgaaaacgctggcagggtatagttttaagaccatagaacagaatgtttgcgggatcagacattttctgcgttttatttattctatcggaatactctccactgattatgctgaaaagatccatatgcctgctgtttccaaaagtgccaaaataccttctgcatggaaacttgatgaactgaaagcaatgctttcggtcattgatcggaacagccctatcggaaaacgtgactatgcaatgatccttcttgcatgtgttcttggtcttcggattggagatatcaaaaacctgcgtttccaaaactttaactgggaagataaaaagctgtctctcatacagcataaaacacataaactattaactctgccaatacctgatgcggtaggctgggcggtgatcgattatatcaaaaatgggcgacctcagtactacgaatcggatcaggtgttcctgaaacatatgccgccatttgatcctatcggcaatgaaaaccatatgcagcaacagcttgtaagatacatgaggaaagcaggtatcgaccagcgtacaaaaaagcactccggctttcattccttaagacattctgccggctccatgctactggaaatggagacaccgcttccggtcattacagatatccttgggcactctgattctgatgtaacggctgtttatctgaagacagatctgcagaaactggccgaatgtgtgctttcaccggaggaattctgccatggataaagaaatctataacagcatttttcaagaggagatccatgatcttatagcattaaaacgtgcacttggattctcttatgaatcagaagcaggctccttgcgacgcattgacacctttttatgtgaaaacaatctttccgaaaagcgtatctctaaagagctttgtgacctatggtgcagaaaaaggacttatgaaactgtcacaaatcaggcgagccgtatcagtgtcatgcgggttttctgcaaatatctcaacgatatcgggattcctgcatatattccgccgaaaaggatcacccggaaaaggagcagatacgatgcacatatttacacagatgaagaacttcaaagtttttttgatgcagttgacaaaagtcagtcggtgccggattcctgcccgtatcgtgctgatgtgatgccggtctttttccgtatcctgtacaccagtggaatgcgtgtttcagagctgcgccttgccagaatccgtgatatcaacctcggagaaggatatatcactattcacgaggccaaaaatcataaagagcggtatgtccccatccatcctttacttacagacaaatgcaaggaattaaaagaaaatatccatgtccattcatccgatgatgaatatttctttatgctgcttccgggaagaccgatgactttaggaaatgtatataaaaatttcaggcgctatctggaacaggctgggatctctcacactggaaaaggtccccgtatccatgacttccgccatacttattgcataaatcttctccgcaaatggagcgatgaaggaaaagacctgattgcgtatcttccatatatgcgtacaatgcttggacatgaaagttttgaggaaacagcgtattatctaaaacttacggcggaacgttttccatatataaaagaacggatgatggaatcttttcctgatctgatcagggaggcagttatcaatgaacacgaattctactgattttgcctgtctggtcacaggatttttaacggactatctgccgcatcatagatgttattccaggaataccattctcagttacagagacactttgaaactgttccttcggtttttaaaagaagaaaaagagacctctccgaattctttttatatcagggacttcaaacgtgaactggtgattgaattcctggaatggtaccggaacaacggggctggtataactgcagcaaatcaacggctggctgcattgaaagcattcagtgattatgcacagttggaacatatcgagtacattgcccctttacagaatgtctctgggatcagggcaaaaaaggctgcaccgaaagaagtatctttcctgactgtggaacagatgtcatcacttataaacagtccggatgttaattcccataccggtttccgacacagggtgatcctgacacttttgtatgacagtgggtgcagagttcaggaattatgcgatatcacgatagccgatatatcgttaggttctgttgcaaccgtaagattacacggaaaaggcaacaaatatcgtacagtcgtgatagcagacgcaacagcaaaacttgtcgaaaactatcttagccggtaccgttcatacgctgtaggaaccgattttttgatcactaaccgttatcatcgaaagattgaccgcgatggtatctcttatatcataaaaaaatatgtagatgcgatccgccaaaaagatgcaacattcccagaacatgtacattgtcatatgtttcgtcattcaaaagcaatgcatatgttggaagccggtatcaatatcgtctatatcagagatttcctcgggcatgaggatatttctacgacgatggtttacgtgagagctgataatcgtctgaaaaatgatgcgataaatgcacttgctccaaaagttactgaggaaagagattttcctgactggaacaaagataaagatcttttacagtttttaaattccttaaagtagagaattattatgccgagttacgcaaatagaaacactggcaaaatctaagaatactgaacgtatctcggcataacatctatctcgtcataaggtggattatgccgagctcggcataatcctccttgtggggttccaatctctgtttcttccatttgttctccgaccatgactccacttgccagaaattttcggattagtgaaagtgttttcccatccttgatttctttgttcagaatagatatcatcttatcatgttctactgtatcaaagaacttttccagatcaatatcaacgacccagttatatccctcattcatgtattcagccgcttttaacactgcctgttgtgcactctttccaggtctgaatccataactgtttgtatgaaatttccgttcatatataggtgttaacacctgtgcagccgcctgttgaatcatgcggtctgtaactgtaggtattccaagttttcgcttacttccattatctttaggaatctccaccctttttactggcattggtttatatgactgatttcttatactctctctgagttgatgaccatttactttcaaatgagaaaacaggtcattacattccattccgtctatccctgccgcacccttattttttattacttgtttataagcacggttcatattttcatttgacagaatgtcatctataaatattctttgtttctccatgcgttgtttcctttccctttcgtgagcttcaaccacatagtacttgtggtacccctctcggcatgtgtattgtcaaaaactctcaattgggacttactccaactgattaactgttccgtccttcgctccatccccattacagagacttcttcactactatgacgtctgctgacttcctatggttcgttgttactatggctaatgataccacccataggatctcccacggttaaaaacgtcatctttcccatcatctatccgccatgtctactaccagtcctttgttagctatcggacttcaacctgttcagcggtcttatccagactgtaagccttatacatgatttctgttcgtcggaccaatggtttgcctcaggcttccttcagattccactttacagtggacacccttgccatattgactatgcgcttcccactaacgggtacgcttaggactttcacctttaagaataacgttcgcgccgggcgaactgaacctcacatgactgaagtcacatgcttccagacgctttaggcgtccgactgaatatcggcggatacgcctgtaacttaggtacgcagttatgcgcatttcccatgccagatatggcaggttcccacattacaggtagtccactgtatatctgcctgtatctatgctgcttttaaacgttccatttctgaatggagtttcctcagatctgcatagacgcatgaggttctacgctttacaggagggacttttgcctccagtaaagacctttccgttgccggaagggattttaaaagttcccttataaaatatctcgcccctatattataggatgctgacaggtcacaattatatcgttttcctgtctggaaagtacagaggctgtgattttcccagtcacgtgttaccgccccggaaccatcataagccaatctgctggtattccatgcgcagatcctggatacccgcatccctttcctgtgtgcctgatgttcacaacacttctggatatctctttttctccacaggtgcagtttctgttttttctttcccgatatcttcccctgcatctccagatactcgaacacgatcacatctgcatggttttcttccgcatatcttacaatcgcacctgcaatctttttacccagttctgtgttcagacgtttcgtatatgcccatcttccctgtgtctgcgcagagccatgttccctctggaatctgcggatccgtcccagtgtgcggtacatccggtctttttcactgggatgatctatgaatcttcttcccaggacagttccgtctgcccgcatgatcgtacagactgcatcggtattgatccctaagtccacgctgcagatgatctgttctttcacaggtgttttggtaagtgttacttcctctttataggaaaaacgcaaaaaatacttctggtgtctcttttccagagtcggggcagatgcctttttccctgaccagcattttctcagatattccatatccgtatgatccagacgtacacaggaccatttccagtcatgaccgtcatagagtttcaggtatgcttcgtctttcccttctgcgccttcacgatacatgacatcacggtagaagaccggcatggcgtggttttcatatacaagctttggtttcccgctctttccgtcggtcttttcccatagatccagccgtgttttataagaggatactgtccccagtgcatgctggatggcagatctgcgcagataggaaggcatctttgggaaccggatatcaaaatcaaaacaggcatggtttttcttcgtagtatgtaccagatgttctgcagcattaaaacgcctctttgcatccgggatttctgctaattcttcccataccttcacataaatcccaatcagatagctgacagcagaacggtagatctccagtgtctggcggatcgggatattctgttttcgtaattccacaccataactggatattatctgcatttttatttctccctgataactcttttctcagattctgttgttttttctactacctatggttatattttagcacatatagtgccaaaagtaaacatgcgttctttctttgagtaaaaaatttgttgtcttttctccaaaggttaaatgtatttttaaattctaccttgcaagagtaaattctatacctgtagaatttacttctgcatggatttttccttcttctttttataaaatactactgcagatgatcccctgcctgtgcagaaggaggataaaatgaatacaggaagaccaaagggtaaccaaaaacatcttgacttatctgcacgtattataatcgaacagcatttaaataacggtgattcatttagaagtattgcaatagaattaaacaaggatccaagtaccatatccaaagaagtcagacgtcattctattatcagggaaagaagtacagatgcatttgcccctattccctgtgcaaataattatgattgttcaaagccccggacaaatatatgtaatgtcatgcatatgtgcggtgataatgaatgccggcacaaatgtgtcctctgcagaaaattcagatgcagcgatgtctgtaaattttataaaccaagagaatgtgagaaattaaataaaccgccttatgtgtgcaatggatgcagcaagaaaacgaattgcatgatggacaaaaagatttattcttcaaaatacgcccaggacacctatgaagcccttagaaccacaagcagagaaggaatcaatcagacaccggaaagtatacagaaactggacatcctgttgtcaccgcttctcaaaaaaggacaatctattgcccacatctacgcatctcatgctgatgagatcgcctgttccagaagaaccatatattcttacataaaccgtggcgtttttcaagccagaaacatagatctgcgccgtaaagtggtatacaagcagcggaaaagaaaaactactgccagccttaaagacagaagtttccgaaaagataggagctataaagaatttctggaatatatcgcagcgaacaaatctgtttatgtagtcgagatggataccgttgaaggagcaaaaggtaccagtccctgctttctgactatgttctttcgaaactgtagccttatgcttatgtttcttttagaagaacagacccagaaagaagtaaccaggatttttgatcatttaacagaattacttggaattgaactgttccagaaacttttcgaagtgatacttacggacaacggacatgaatttcaggaccggcagagtctggaatatagcaaaaatggggaagtacgcacacgtatttattattgtgatcccaaccgttctgatcaaaaaggtgctattgaaaagaatcatgaatatataaggtatgtccttccaaaaggaacaagctttgaaaaaatgacagacaagacaacgctgctgttattaaatcatatcaacagcgaaaaacgggacagcctcaatggacacagtccatatgaagtatcccgtctcctgctggataacagacttcataaagcattaggattggcagagataccagccgatgaagtcacattgataccagcattaataaaataataataacaatacaggcacaggcaagtttcattgcatagaatttagtctttccaacagacatgtggaatttagtcctgcacactatttccagatgtccttttatcatgcaaaaaactatgctgtttattccgtataaaagcattatatactaaaaaaattaagttgtgtatctccgaaaatagaatttaatcccgcataaaatcaaggtgtgttagaatgtagaatttactttttcattcaagctcttttctccaaaaaagtgtataatacgatttaatcgaacattcattgacaattaccggtttttagttctgtcagtcacggtatagaaatgtcggactttcagctaagagggaatcaggtcagaatcctgaacagtcgtgctgctgtatacgtgcagccatatctcatatccattgcatcgttatgcgagaaggagagacatggcgttactgcgtgagtcagaatacctgctataaactgccgccattaactacacgcaataggaaatggaagggtgatcttctttagtgttctcttttttacagaagtatcatccttacatatgttttctctgttccttttaaggaatatagaacaccggcagttatcggtaccttgttatttttatcatagtccatactactcccatacagagaaaacaacattgtctatcagcaaaggagtatttttttatgtcacattctctgacacttacgcgtcgtaactgcggacagtatattgagaagaatatggaacttccacaaaactgccgcgctatctcagcagaaaccttttttaacagacctgatattcgttctgtggtatttccctatgaaatggaacagattggaaacaaagcctttcagggatgttcccggttaagcagaatagagcttcctgaacatctgcaaaaacttggcataggggtattttcagactgcatttctctgaaaaaagtcaaaattcccgccagccttaccagtattccaaaaaacgcatttaacaatggccggaaactgaacagtctggagttcgccccgaacagcaaactgacatttatcggtccgaatgccttttcagaatgcgctactcttacggaagttgttttccctgcctctctggaagaaattgatgacagggctttttataaatgtaagaaactgagttgtatttcttttccggggggggatttaagggttatcggaaagcaggctttctatttctgcggaatggattcgctgcagctgcctgattcgctggaagttcttgatgagagtgctttttttaagtgctgtaatctgacctctgtggtgattccgcccaatgtcagataccttggaaaatggatctttcatggatgtaaccgcctgcagtatctggagattcgccatgatcctgaatttatcggggaatggatcatcaacaaagcggctacgatccgctgttataaaggttctaaagtagacagatactgccagcagtcaggattcaaagtagaatacttttcctaataacaacaaaatctgtattgaacagacaaaaaagaggaatgtttatgaatgatacttttacttattttcaaaagaagggatgtactgttttttcttttccgggaaaaacaagggttcttagcaccagtcctcttaatggcgggatcactgctcatctcacgcatgctttaaatatcaactgcatgaatggtgcctatgaatgtgaaatgcttggaaacacctatgaggaagacctgaacattcatacaaaagagctgggaattgatccgcagacagcaaccgcactcagcacagcggcatggactgaactgtgtgctgttgagaaaatctgttatcaggagttatccgtgactgctgctgttacagggggaattgattcaaacggaatgtgtccgggagatccttcttcttactatgaaagaaacggcgcttacgagatgctgccacccggtacgatcaatgtttttatctatatcaatcagaatgttacagaggcagccatggtccgctcaatgatgattgcttcggaggcaaaagcagcggccgtttcacatctcttacttggaagctgttattcagaagaaatcgcgacaggttctggtactgacggaatggtgattgcctcggctatggagggagagctgacacttaccgatgcctccggacattccaagcttggagagctgattggcagggcagtccgtatggcagtaaaacatgccctgatgaaacagacagctgcctgtggtccgagacagtttcaggttcttgttcgtactggcagatatggaatcaccccgggaactctgtgggatttttatacagagcatgagattctttttcatgcatacaatattagttttaagaaagcttctgagctggaaggaatacttctatcgcgaaacagaaacagcaatctggttttatgtgtgtctctttatcttcatctgatggatcagcttcgctggggactaatcatggaaccggaggctgtccgagagggaaaaaggctgcttctttatggactgtactgtggacgggatacttatctgggcgatgtttatcctgaagatgtatggaagaacgaagtactgaaaacattttcacttaaagaacagctgatttatattttaatctgttatttttctgtcagatcatagttggatcatcacatttttatggtaaaaatattctatgcctgctttctcctgatgaaatacaaaagggaagtgaatagaataagttcaatgtccactcacttccctcctgaaatcgttgaaatctatatacacattataagggaaaagccgcaaaaaagcgaatccgggtggttgtggataaagtaaaaatgacggataaaaaacagtacataacatcaagcatcaggtaaactaataaacagcctgaagaaaactctccagactgtttttatcatttctgtgcgaaatactcttttgtaagtgtaatggcggttcctgaaagcaggaatacaccaattaagttggggattgccataagaccgttgaatgtctcagcaatgctccagagaagtcccagatctacagttgcaccaaggattgccactaatgaataggcgatcataaatgggcggataacttttgcagagaataagaattcaatgcagcgtgctccgtaaagtccccatccgataatcgttgagaacgcaaagcaacacatggcaactgctgtaaagatagaaacccagcctccgtatgtagcagtaaatccggaaattgtaagttctgcgcctgccgctgcaccgtaatttaccggcacgccgcttacaaggatcacaagtgctgtcagagtacagatcacgattgtatctgcaaatacctcaaagataccaaacataccctgttttacaggtttgcttgtatctgcacaggcatgagcgatagaccctgtaccaagtccggcttcattggagaaaatacctctggaaacaccctttttcatactgaggaaaaagcttccgatcacaccgcctgtcactgctgacggattaaaggctccataaacaatatcatggaaaactgccggaactcttccgatatttaagaccacaacgcccaatgcaagtacaatataaaacaatgccataaacggcaccagcttctcggaaacacttccgattcgcttgataccacccagcagtaccataccaaccagcagcgtgatcacaattccaaggatcagattcaatctgcctgtggaagactctgagatcacattgaagttaataagagctgtatcaattgctgttgtaatggtatttacctgagtagcattacctgttccaaatacagtcagtacaccgaatgcagaataaagaactgcaagaaatctccaattctttcccagaccgttcttaatataatacataggtccgcctacataatctccatgtctgtttctctcacggaagtgtactgccagagtaacctctgtaaatttcgtgcacattccaaggagcgcggaaacccacatccagaatacagctcccggaccaccgatggcgatagctccggcaacaccggcgatatttcccgtacctactgtacctgccagtgcagtacagactgcctggaaaggtgtcatggaaccgtcagaagcctctttcttcttaaaaattcttcccagtgtggttttaagcgcatacgggaatttgcggatctggacaaacccggtccgcaggctcaggtaaagccctacgccgataatacagatcatagccgggacaccccagataaaattatttacgacgttattgatggattcaattgtctgaagcatgttaaataaacctttctttcgtgtaataataacagtttagcacttttttcaccgtatgtacagaaaaattctattaagataaagcattaaagcacaataagttaacagcgcaaacagatacgatcagccgctccactgcttgccatacccatatcactgcttcacagtttgagcaaaagtcaaaataacgtataaatttgtcataatttcagtagcatttcctcacccaaacctctattattgtaaatatgaaatcaaggaaaacacctatgtattttctaacagtacttaagcgtttcagtcattaatttaacacttttcaacctaaggaggacatgacaaaatgattcagaaatatacttacggaaccccatttgaaaccgatgccatcgtaacttctatcccggcttctgaggggactcctgcatacggaactatctccacagagaacggcttctcttttacttatgacatggatgacaacgatgttgtctatggtctgggcgaatcaaaccgcggaatcaacaaacgtggatacgtttatgaaagcaactgttccgaccagccaaaccatacagaagataaaatctccctctacggagcacataacttcatcgtaatctccggaaaacagactttcggtctcttcgttgattatcccggaaaactgaagtttgatatcggttacacactctcttcccagttaaagatcacctgtgaggatgcagatctttatctgtatgtgatcgagggtgaaaccccttacgatatcgtaaaacagttccgtaaaatcatcggaagaagctatatcccacctaaattcgcatttggtttcggtcagagccgctggggatatacaactgctgatgacttcagaaaagctgctgacggatatcgtgaaaacaatattccaatcgatatggtatacatggatatcgattacatggaagactacaaagatttcacagtcaatcaggaaaacttccctgactttgaggcctatgtcaatgaaatgaaagaaaaaggcatccaccttgtcccgatcatcgatgcaggtgtcaaggtagaggctggctatgatgtttatgaagaaggcgttgagaagaactacttctgcaaacgtgaagacggcagtgatttcgtttccgccgtatggccgggctggactcatttcccggatgtcctgaacgcagatgccagagcatggttcggacagaaatacgaacgtctgatttccaaaggaattgacggtttctggaatgacatgaacgagcctgcaatgttctgcacaccggaaggcgttgctgaattaaaagaatacatcaaagacaacttcatggacaatgaagaaacatctggattcgttctcggcgcaaaggtaaaaggacttgcaaataatccggaagattacaaacgcttctatcacaatgtaaacggtcagaagatccgccacgacaaggtacataacctgtttggctataacatgacccgtgcagcaggtgaagcatttgaaaaaatcgcacctggcaaacgtttcctgatgttctcccgttcctcctatgtgggaatgcacagatacggcggaatctggatgggagacaataaatcctggtggtcacacatccttctgaacttaaagatgcttccatccctgaatatgtgcggtttcctttacacaggtgcagatctgggcggattcggtgcagataccacacgtgatctggtactgcgctggctggcacttggtgtattcacacctcttatgagaaaccactccgctctgggaaccagagaacaggaagcttaccagtttgaaaatatcgaagacttccgccatgtgatcggtgtcagatatcgccttgttccatatctgtacagtgaatacatgaaagctgcattaaacgatgacatgatgttccgcccattggcattcgactacacagaggatgcattcgcaactcaggtagaagatcagcttcttctcggaaacgaaatcatgatcgcacctgtttatacacagaatgcaaaaggccgctatgtatatctgccagaagaaatgatgttcgtaaaattcctgcctgacggaacaatttctcaggagattcttgaaaaaggacatcactatgtagaagttgccctgaatgaagttccactgtttattcgcaaaggaaaagcaatcccggttgctgatgttgcgcagacagtaaaggatatcaatccggctacgatccgcatgatcggatatgagggagctgaatatgaccgttatgatgatgacggagtaagtgctctgtaatttaaccaaatcaatcagatttatctgcctcaattacaggaattaccagacagcagttagaattgaacgagaagtcacctcataaaaaataaaaagaaacagtcacatatatccaatgaatatcaatatattctctcggttatgtggctgttttctttgggaaatctgttttattacagcttcacaatcattgtattttcctttttaaaaactatttctcccaatgaacttaaaagtgctacattaaccccttcatatttttgatattcacagcttccaataaaaatataattcacctcatatttatcaagcagttcctgtacttcttttttatctgttgaagtataaatagtttccacgtctgttcttcttttgttttcttcatcaagattatttcgccataaccattcatgaacataccatcccaataccgtcggcaatcctgtcatagcagaaacccggttgtcatagtctttataactgtcgccgcaagcttcaagaacggttggctgacctgtaatatttttattcagccatcgtattgctgccgcatcttcaggaatggcattttctatataagcagttgcattgagagtttggtatttatttttcagaggaaaacctgtaaaccaatttgttgtagcatttacgaaatatccacaggtagatataagaagtattattgccattcccccaacggttatctgcacttttgataatcttacctttttctcatatctattatccaatttagtttcttgcaaaatttttattctgtctgccacaaaaaataccagaatatacgacatcataagcgcaaaaagtatatatgcctgataagtcaacttaaacatagtatttgctcttggtgctgttttttcatagatatctcttacataaatgatttccggaatcaatattagtcccattgcacaaagagaaagtacaactccgtataaatcagaaacattaattttgtaaaataaattcctgttttttttatttgtaaaattcctattttttatcagcgtagatacgacaaataatccacatataagcaatggaaaagcccataatacacaaaactgataaaacgccgtatgaattttcactattccgattccctgtaccataacacttttaaactgtaaatggaatggtaacgaaatcaacaccgcagtcagcagaagttctatccattgcacaacgctccattttataccggttctcatatctgaaggtttcatatctgtagaattaagatatctcttcaaatttccaaaaaacagtgttccacatattacaacataataaatcataaaatcccatgtatttgaaaacaggaaaattccaaggaacagtcccagcagaaatatctctttctgtttccagcttttaccgtaatttctttttatccatgcatataaaatccccaatactgccaaaacaaaaaacacattaatcacatgcgcatgtaaatccccaagaacaaaagaatatgaaggaaattcatgaattgtctcgtcccctgtcacaggtggatcaaatcctataaatcgtgttgtgcttggaaaccagtaatcttctcttatccccagtaatgtaaaaatttttccatatataatataatgaaggtttccactcatggatacagataaacctgctaaaatacctccaaaatctgttatccatgctcttccccttttacctaatttatccttaagcatctgacgcacaagactaaatggcaatacaaacgcaaatgcagctatcatggtacgcataagattgtatgtaatctctacctttgttcctgtaagtttcgtaagaaacaccgcaaaatattgaccaccataatagtagttaaaagctttgccagcataccacatatcttctgacggaagtgttgtgctacgcatcatagacttcataaaaccaaaatccatatatttttcagttccatgagctgccggatgaaatcctgccatatatgtccacaaaagaaatacaacaaagaaaatcacttcttcccaataaacaagttccatatgtttccacggaaaaacctttctttgttttccatatattccataagcaatactgctccccccacataaggtagtaattacgacagaactcaatgtggtaaagtgaaccacttttatagaagtcaaaatccatactccatatccgcatatcactattgctataacctttgaattcatccatccattatcatcaaaacctttgaatatctgagccgttatcggcataaataccaatccaagaatccataaaatttcccaccatatcatgaatgtaaagaaatcggatcctaacagccaaaaagcaactcctatcaatagccctgctgccagtaatttaaatttatttacttttttcataataatatatttctccataatttttttataattaagcaaaaatataccagtcacttcatcatataagctacaatagctctatatctttttttgcatcatttgtatttgaataatatcatatttattgcaaaattttctaaaatggcgaaattcatatataaattggcgaaattcgtttttcgagaacatattgtggttttttatgatgttttctgtcacaatattttccctcttgactaattttctgcaaaataaaagacagcgcagtcctaccactacactatctttcatagattctacataatttataagtacagcattacctttacaataaaaatctgatttgtattcgaaacatccataaatccctgatatttctctaccatcttcctgacatttgcaagaccaatgccatgtcctttttcttccttcgttgacaataatttatttttctctacagccaattcatgttgaaagctgttttttatttccatggaaagcatgcccttttcatagtatatatccactgacatccatttatctttcgtctgttctgctgcttctattgcgttctctgtcaggtttcccaaaatcacattcagatcaaatgctgatatacacaaatcagatggtacccgtacctcatactctacatgattcagtttcttttttgcctgtcccagaagataattcagcagactgtcaagattcttattcccacagctgaccagttcagactgattctgcatatactcccccatgtcctgtatatatttccgaatttcttcattattctgatttccagccataagtgcaagttctcccagatgatttttcatatcatggcgtagagcttttactttctcttccgattgcatcaacacatccaactggtgagaataaatgagcatttgtttttccataagagattgttcttccagtttcttatacgcgcttatcagaacatcatataaatagaaaatcaataatacaactgccaaaacacaacatccaaataacaccagcaggatacgattttttagttccttttcaacaataagcaattctgccagacaaagtgctgaaataaccgccagtatcatcccatgcggagttttatcttctcctttattcttaatcaagattttttctgaaataacatcacaaatcagcaataatagtacagttatatacgcagcacattcaccgactttccctgttattgaataatctgtcagtaaatgaacagatactaaatcacatcccatattagttccatatacaagtagtgtcacaaatattttctttttcaatgctccttcataacacactgtaatcagaaaaatcagcactatatttgttattacactcatacctggcgaataaaatatcagatgtaccactgctgtcaaaataaaaaacaatacataacaggctctttcttttttcttttcctccatatctgtccaaaagaacaacctcataaagcgatagattatatatgtacgcaaaagattcgtgcttaatgtagttatcaacgcaaacatttactctctgtccctccacacacgttccgccagttgctttctcactgatttccgatatggctggctgattggaattgtatctccgtttttcattttcacagattcataagaacattcttcgatataatcaaaattgatcaggtacgactgatgaatctgaatgaaatttcccggaattttctttgctatttctttcagtttgccattaaattctttctgtccgtcttttaaaaccagatgcacttttttattctgactgctgaaatatagaatatctttatacagcaccttgaaataatatccattgccaaagtactcgaaaataccttttctgacttccgaaattttctgaatcctgttcatgacattcccaacttttattttgtctaaaggtttgatcagaaaatctgtaggctgtacacgaaatagatccatcgcataactgctgttcgctgaaatgtaaacaattgcagtttccatgttttcctgttcttctcttataaaacgtcccacttcaattccatttgttgtcagtaattctatatccagaaataacacatcaagaatcttcttgttttctctcaagaaccggcacaggctttctccctgataccagatatcaatattcatctgaagtttattctcttttccataatcataaagcattttttccagttccccgcagagtccttcatcatcatcgcaaatgccaatacaaaacatttcttttctcctttcatactacatgcagtatacagctcttacaactctacttcaagacaaaagtaccctttgatttcgcgtggagtactctcagggaaaccaaagggttcacatatgaaagttattatttttctttatttgccaaaacaatataacggtaaatttctgtaaacgggatctctttttctctgctcaactgtgcaacgctctcatattccggataaagctgctcttttccattcaaagtgcatacctttacctgaacttctccccatggagtcggaagggttctcgtttctctgggaagaatcgtacgttccattatgctataacgaattccaatcgtagtagtttcttcaaaaataatattctgaagcgtttccatatcttcttccttacagatcacattcagaacccatgcaggtctgttctttttcataaaaacaggcacataatgcacatctctggcaccggctttcatcagacgttccatgacaaatcccagaacttctccactgcagtcatcaatgtttgtttccatcttgataatcgtatctttggtttcctgattttcagctttcggattatttccgatttccgggtttttgaattcttctgtctgagccttttcttcatctatttctgcgctctgtgagataatcattgcccttaggattcccgggcattcatactggcgtttacctgcaccgattccaatcttctggatttcaaatgtttccggaagtttatcctttgttttcactgctgccactatcgccgcacctgtaggcgttacaagttcaccttctacctctgtcattttcagatataaatgattggcacttactatatttgcaactgccggaaccgggattggcaggatgccatgctgacaacggacagttccccgtccctcacagagaacaggaacgattacctctgtaacatccagattatccaagcagactgccacagacacaatatccacaatagagtccactgctcccacctcatgaaaatgcacctgatccacaggcacattgtgtgctttactctctgcctctgcaagaatttcaaatatacgcaatgcgatcttctttgcattctcagtcattgcgctatgctctataatataggtaatttcttttattccacggtgttcgtgatggtgatggtcttgcgctgttcctgtgccatgggcgtgattgctctcatggccttcatgatgatgtccatgcagatattccatatcatggtcatgattttcatgctctttatccagcacaacatcaaaatcacatgcatctattccggacttcacaactctgctgatctttgtctcaaatcctgataccttaagactcttcagcaccctgtccagcactgaacggtcagctcccagatcaagaagagccgcaaccgtcatatcaccacttatccctgaataacattccagatataatgttttccccataatcaatttcctttctcatctgtacctgctgccagacggttgatctgtgttgccagatagccggcaccgtagccgttatcaatattcaccacagcaatcccgttcgcacaggaattgatcatggtaagaagtgccgaaagaccatgcatacttgcaccataacccacagaagtcggtactgcgatcaccggtctgctcaccagaccgcccatcacactggcaagagctccctccattcccgcaactgcaattacacagttcgcactctggatcgtctccagtctggagaataaacgatgcattccgctgactcccacatcataaatccgttcaacatttgtgccaaaatattccgctgtctgtgcagcttcctcagcaaccggaatatctgcagttcctgctgaacacacggcgatcttaccaatacgcttcttatctttcttctcaacttttaagatgcgtgagatcggatcatattctgtttccggaaacttctccttcaccagttcatactgatgttgggaagctctggttccgaatacctcaccgtcttctctgtataatctttcaaaaatattcagaagatgttcatctgccttattactgcagtagattacttctgcgaaaccggttcttgccttgcggcttgtatccagcttcgcatatcccatttcttcataactttctttcttaaggattctctctgcctcttctacagatacagaaccactttttacactttcaagaatctcctgtaaggtcatggattcctccttttagaacaccacctgcaccagaaacatatagacagctgttcccgctataatactgagcagtgtatttctcttccacaaatgaagattttgctgttatcattctttttccttatcagcgcccttatttccacgctgatcgtagtcatccaggaaattgtagtattctccatctttatgatatcccataacagtacgaagattaatatcccgcacactgttaaagatattcgtctcaatcacactgcttgtatttctaaactgcgcaactagctctttcatctcatcacgcttggaaccacgtccgcctccacagcttacacagttctcggtgaaacggcatgcacactgaatgaaatgcagtccattggtatctctccatgccttgattgcagattccttgatcagatacatagggcggatcaattccatcccctcaaagttctgactgtgcagcttcggcatcatagtctccaccttaccactgtacagcatacccatgaggatcgtctcgatcacatcatcaaaatgatgtcccagcgcaatcttattacatcccagctccttggcatgagaatacagataaccacgtctcattctcgcacaaagataacagggattattctcaatttctgccactgtatcaaaaatatcactttcaaaaaccgtaagaggaattcccagaagctctgcattatcctgaataatcttccagttatccgcattatagcccggattcattaccaaaaacaccagttcaaaatgaattttcccatggcgcttcagctcctgaagcagcttcgccatcagcatagagtccttaccacctgaaatacagacagcaatcttatctccctcctgaatcagctgatactcattcaaagccttggtaaacggtctccagaccgtctttctgaacgtcttgataatactgtgctcaatctctttcgtcttcagttccttctgctccttagcatcattctccataaaacggctcagagaaagtctcagataggcacgatatccaccttcaatattcacagcctcataccctgcatcactcagcttctccacacaatcccggcttctgtcccccgtatgacagagaacatacaccatcttctccctgtccacagactccattctttcctcaaactcatccagcggaatattcactgcccccggaaaagatcccctgctgtactgatccgccggccgcacatccacgatcgtaatcttagaagaatcaatcttctccagctcttccacactaattgtattcatatataacctgcctttatctattaaaatcaatcacttacctctgatgaatcaccctgtatttccgctcaattcaccagccatcattatactttgaaaccccatgatagtcaacatattcccttgccgttgactcgtaacagtccctgtttcgttactgtgtgaacggagtgaacagtaacacaaaaggaacagagccaatgccctgttccccttttattatttataaacttttacaccaaaggattcatgaatgatagtacgagcctcttcaatggttttaaactcttctgctttcagcatctgtgctgtgatatttccgattgcagttgcctctcctggacctgcatggatttctttctttgttgcctttgcagtcagctcattgagatatcctgcgttggaaccgccgcccacgatatgaatacggctgtaagtcctgcctgtcatctcttccagctcttttgctgtctttgcatagcattctgcaagacttgtgtagataactgttgcaatctctcccagagtttccggaaccttctgtcctgttctgcggcagtaatccttaacctcctctgtcatattgtcaggagaaaggaaacactcatcatttgcgtctactcttgacgggaaatcctttgcttcctctgccattgcgcagatttctgcaaagctgtatgcatcatttacttcatgacgcacagactggatcatccagagtcccatgatattcttcaggtaacggaaacggcctgcataaccgccttcatttgtgaagttcatctcacagctcttctcagagcagtcagcttcttttctctcaattcccatcagtgaccatgttccggagctgatgtagataaagtcatcgtcatttgcaggaactgccagtacagcggatcctgtatcatgtgttgcaggtgcaactacttccagatcaaagcccacttcttccctgatcttatctgacagatgtccgatgcctgttccgggcatgatcagcttctggaacatttttctcggataaccgagcatatcgatcagttcataatcccagtccttagtgatcgggcttacaagctgtcctgtcgtagcttctgtgtactcacaggttttctgtcctgtaagaaggaaatggaaataatccggcacatgaagaagtgtctccgcctgttccagatattccggatgtttctttttcactgccatcagctgatagatcgtattataatcagctttctggatacctgttcttgcatagagatctttcagggaaattgccttataaacttctttatccattccctctgtacggtggtcacgatatcctaccgtatttccaagaactttatcatccttgtccaaaagtacaaagtcaacaccccatgtgtccacacccatacttaccggaatcttgccgatttctttacatttcttcagaccatttactacctctttgaaaagacggtcaaattcccagcagagttctccgtctttctttaccattccattctcaaaacgataaatttcttccagaaccatttttccgttttccatatgtccaatgatgtgacgtccgctggatgctccgatatctactgctaaataatatgctgccattgcaaaacctcctcaatatatgaatttatacgctcttcatatctgatgatttcattttatctcaacttactccccaaaataagaaccttgtttgtctgaaaaagtgtccttatttgctattttgaaatctatcgtcgaaataagtatctttacaacttaataaaatcatcatttccaatcattgttttattgtttgaacaacaacgccgcacttgccatacggcagtgcggcgtctgtatttgtattaataattaatacttaattctaaggattcatttcctctcgatatttacttatcgattagtcataaaggttaggagcgatttcttcgctgtccatgtttgtggaatcataccagtatccatctgtaggaacatcttcaagttcctgtccgttagctgctgctgtcagagcgtagattgcatagtaacccatcatcagaggagactgtgtaacagcaccgatgaatgttccatcctgtacagctgctttaatgatagaaccagcatcgaaaccaacaccgataacatcgcctgctcctgcgtcagaaccaagaacgttcaggttagcattagctgcaagaacaccttctgctgctgtctggttggaaccgaagatagcaatgcagttttcctgagaaaggattgcctgagcctctgttgagcaaagctctacagttgtctgtgccggaacagctacctggataacaacgtctgcgtctgcttcttctgcatctgcacctttagctgcgtttacatagaactcgttacctttaactgcaactgtttttccgtcagcctgaagcagttcgatcattttgtcaataaatccgccgccacgctgctggatattctgagctgtagcatcctggttaacttcgccgatgataacctgtccttctgcattagctacaacatctttgatcgcattgtacatattttcagctgcaacagaaccagcctgtgcgttgtctgtacaaacttcacatactacagagccttccggagcgtcagcgatacctgtatcaaatgttactaccgggattcctttgtcaacgcattcctgaagtgcatcaagaacggaagaagtatcgcatgcagcaagacctaaacctgccggctttgcagcgattgctgtgttgatcatgttaacctggtcagcgatatcagattcactgtttggtccctgtgctttgtatgtaacaccaagttcatcagcagctttcttcataccttcctgagctgcatcccagtatgtagactggaaagatttaaccatcatcgggaaatcataagcttcattagctttcagatctttgaactgttccggcatatcggctgccataacgcttgatgcggacatacctgctaccattgctgcacacataactaatgcgatcactttttttgctttcatttaaaatttcctccttttaaatatacatttttaatatagtttttttataaatgataccccggaggcttcctctctcgttccgccttccccaaaatacacatatgacaatactgtcgccgaacatcccctggaagccctccgttgtttcatatcctgctgttttgcatctgtcgtaagatgcatttttctttattcagttttgaaaattattttgctgctgctttcttttctttcatgatatcgatcagtactgcaatgataagaactgcacctgtaatgatctgctgccagtttgcctgaagtccgatatatggaagaccggttttcagaagcatgataacgaagataccggctaaagtaccgattactgatccataaccacctgttgctgcaacaccacctacgaatactccaccgatggcatccatttcaagtcctgcaccggtaccaggctgtacagttggtgtaactgccgcatatgcgatagctgcaagacctgtgaagagtccgcatactacatataccataacatgatagaatttaacgttgattcccgaaagagctgctgcttctttattggaaccgatcgcgatcgtataacgaccgaattttgtatgattcagaacatattccattacaaggaccagaatgatcatccataagaaaccgataggataacgggaagcacttcttcctgttccaactgtaatcttaaagattgaatgaaaccatccgccctcctgtgtaagtcccggccagggagtggcactgcacagggatcctgcacctcgggtaatcatacaggtacaaagtgttgcaaggaatggcggcaggttcataataccgatcagcacaccatttgctgctcctacaataattccaagtacaatgcaaagtaacattgcaagtacaaccggaagattattatttcttaccagagatcctgcgatcaatgcgtaacataccatacctgttccgattgacaggtctacacctcctgtaataagagggaatgtaacaccgattgccatcagaagatcataatatgagaaatccagcatactcaggattgtggtatactgtctgaactccctgctcttaaaggagaaaattgcaaacagtacaataataaccagtaatacaataaatctctgatcacttaaaatactttttttcttcttagtcatgactttcctccttaattgatgttccgtgttgcatgattcataatgtgttcctgtgtagcttcggaaatatcaatatttcctgtaatcttaccttcacacataacgataatacggtcactcatacggagaacttctgtcatttcagaagaaatcatgataatagatttaccttctgcagccagtctgttcattaacttgtaaatttcattcttggcaccaacatcaatacctctggtcggctcatcaaaaataagaatctcactgtctcgtgtcagccattttgcgataacgaccttctgctggttaccaccggaaagattgactaccagctgctcgcagtttggagttttggttgccagctctttaacgtatttctctgaaacctctttttcttttgatttattaatgaagataccactggtaaattcttccatggttgccagcgtagtattctctgttacagatttctgtacgacacaaccatatcttcttctgtcctctgacagataaccaataccatatttaactgcatcctgaggactgttgatagttacctcgcgaagctgtccgtcttttccccttatagagatctttccactctgtttcgggtcagcaccaaacagtgctcttgctgtctcagtacgtccggctcccatcagtcctgagaaaccaagaatctcacctttgcgaagttcaaagcttacattctgaaccatcttacctgcattcaggttctctaccttaagaacaacaggtgcatccggtgcaaccatgctgtgttccttaggatcttcataaatgacacgtccaaccatcatgttgatgatgtcttcttttgtactgtctgctgtgatcagcgttcctacataaccaccatctcgcatgactgttactctgtcagtgatcgttttaatctcatccatacggtgggaaatataaacgattccaagacctttcttacgaagatcacggataatctcgaataagtctgcaatctctttctctgtcagtgctgctgacggctcatcaaagataataacctctgctttgtgggaaatagcctttgcgatctcacacatctgctgttttccgacggtaagattgttcatcttttcttttggattgatttcaatgttcagttcttgaaagagttttttggaatcttcgatcattttcttatcatcaatgctgaaccctttctttggttcacgtccgataaaaatattctgagctacggtaagatcacctaccatgttcagctcctgatgcacgattacaacacctgcatcctgcgcttctcttgtgttatggaattcagtttcctttcctttataggtaatggatcctgaatctttctgataaataccggtaagaactttcatcaatgtagactttccggcaccgttttctcccataagagcatgtacttcgccgcgtttcacttcaaaattaacgtgatccagagcatgaactccaggaaaggacttatcaatgtccttcatagtcaaaataacttcacccattgttacatcctcccttccgatcagttctttctgcgtcttgcagaaacgtcgacataaactgctacaattacgataagtcctgtgatgatcatctgctgacctttaccaagaccaaatgccatgataccctgctgaagaagagaaatgataaatacaccgatgactgtaccgccgatagaagcaagtccgccaaccatggatgtaccacccattacacagcctgcaatcgcttcattgttgtactgatcgccgtatccaggctgaacagttgtataagcgccaacaaagaaaattgctccgattcctacaagaacaccgcagatcacataagcaagcattctccatttttttgtattaacaccgctgagtcttactgcttcgctgttagaaccaagacaaaggatataacgtcccggttttgtgttataaagaataatcccacagatcactgctgctgccaggaaaatcacaagtcctacagggaatcccttataggagataagatttctgaaccatccgtttacaggatcacttcccagcggccagctgacggactgtgtctttgtaaatacagatgcaataccttttgcaatgttcatagatgccatggaaatgataaatggcggaactgacatataagataccatccagccattaaacacgccaaatgcaaatccgatcaagatacagatcaccattgctgctgcacaaggtacatgataagatgtcatgcagtaacctgagatcagggcacagcagaacattaccggtccaatggagaaatcgattcctccagtggcaattacaaatgttactccaagtgacagaaagcccaggaagtatacatagttcaaagtagatttgatactgtcacctacagggaacttacttcccagaactactttgaagactacgaacataagaaccagaatacatgctaacaggattctgttcagaccgagtttcttcacaattggattttgtttcaacttttccaagtttttcaccctccttacgttatttcgtatctctctttgttttctatatcttaccttaccagtcggataattgtaatgaaatatcttccaaaaaaaggttaaatatttcctttttttcatccggaaatatttaacctttttgcttcttttatccttatattacgcagtcgtttcaacgcgtcagtcagctaaacgggaagatcagccgttcaatatcactgttatacatattctccggcgtaaccagctcacatcctgaatcaatattcttctctactgcatccccgttaagcatatgaatggtttcttccactccgatataccccatccggaatgctttctgcacaataattcccttataaacgcccatttccataagattgatggcctcctgagaacagtccacaccaactactgcgatcttatctttcgctcctgcatcactgactgctcttcccacaccaactgcagaatattcgttcattcctgcaatcagttccagatccggatatttcctcatcagttcctgcgccagttcataggatttctcatagagtgagttacagtagacaatatctactatgttatcagcatagtcaccaaggccttccctgaatccctgttctctctccacagctgtagaaacaccttttacatggctgacaatggctatctttgaatctttatcgattaattttctggcatactctcctaacatcctgcccgcattcacattatctgtggcaactgtgagatcctgcagtttttcttttgtataggaatcaatataggtaatacggattcctttttcttttgcttccttcagaagttcgtctgatgaatccatgctggaaggggaaaacagaatcgcatccggtttctgctcaatggcttttttcagaagtttattctgttcttctatattctcttctttatccggagccaggatttcaaggtcagattcatattcctctgccgccatcttacagccggatattaccgaagtccagaaatcattggtattatccctaatctttggaatataaatgagggagcatttttttgtctgtgttgcctccggtttcaggattccggcaaaaatcaccactgctgccgccataaggattgcaactgttataatctcttttttatgacttttcatgggattcctcctgtattccgggaattacaacagatgctgtggttccctttcctttttcactgtgatagataatgccataatcttttccataatataaaaccagacgctgctgcacattgtacaccccaactccattggaacggtaattcaccttatgcttatcataaatatgtttcagggtttcctcatccattcccacaccatcgtccgtaatatcgattactgcattctcacctttcatatatccatgtactgtcaacagtcctttactgtctttatattttaagccatgataaattgcattctccacgagcggctgcaataccagacgaatgataggtacctgtgtaatggatggatctgcctttatctcaaattccagcttatccttgtagcgcatcttctggatcgtgaggtaacttctgacatattcaatctcctgtccgactgttacaagctcatcctcattgctgatactctgtctgagcagtcgcgccagagaagccgtcattatcaccacttcctcattcttctttccttcagccatccagataatagaatccagcgtattatacagaaaatgtggattgatctgcgactgcagggctttcagttctatttttctcttctgctcctgctcctttacattctgctccattaattcccgtatcctgtgcgtcatcacattaaaagatctggtaagacttcctatttcattgtcggaaataacctctatatcttcaatatcaaaatttcctttctgcacacttttcatggaatcgcgaagcttctggatcggcagcgtaatatttctggcaatcaggctggaaatcagaagagcaactatgatcagccccactgctaccagcacataaatacttcttgtctgtctgctgtttcgtaaaagttcagacatattcatgcatcccacaatagtccatcctgtgatatcagaatgggacagtgcataaattttctcgtcatctccctttccgacagtaacaatatctgattttgcattcataacaagtgaaatgttctctgtctgcagttcattatataactgctgctgttgtggatgataaacgatatttccattctgatcaagaataaaaacatatcctttatctcccatgctgctctgtgcacagagttcactgatcgcactgtaattcagatccagaaaaactactccatcctctgcttctgttcctgtataattgcggattcctctgctgagtgtgatgacccatggtctttctccctttatcacattctgcacatgagatgatgtcagattataccggtcatattttccgactgcatctgcataccatggctgtgtattaagatctacatatgtatttctcacagataatccattgtcaaacagagatggagagttcttatcctctctgacaatcccgatatttctgatatccgccctgcccttcaggattgttttaaactgttccacaagacgctgtctgtattcactgtaattttcatcctttgtggctccatatcctttttcactgtacagatatttataagcatcaccgctttgcgcgatcactgacgcaatattatccatataactgatatacgaatctatattctgattcagctgtttgatgatcgtctgtgtatacatgacagaattttcataaatagatgaattcgtatatctcagagataccactgtcacaaccagcacagcacttaataccaggatcgacaccgcacagaaaatagaactctgaatactcttaaattttgaagaaatcttcatcggcgtttctcccttgcatattcggtaggtgtttttcctgtcatcttcttaaatgaaattccgaaatagtgtggatctgaaaatcctactttttccgcaatctcataattcttcagagttgtattctctaggagttccttcgccttctccattctgatcctggtaagtgattcgacaaatgtttcccctgtcatctccttaaaaatagtactgaaatagctggtactgatattcagataagaacagatactgttcagactcagatccggatccatataatttttccggatataatccatagccatcattccctgcctctggccgctggaactattcagatcctgaagtgattcaaatactccttcagcatactccttcaccaatgtcactgctttatcaaaggtttttgcctgagaaacttctttcagaagcttctctctctgagcaatgatcttttccggatcatcactcagggactggcaggtatttccgatggcacgtatcacctgctgaagataaatgcaggcatagcttttctccaccagtgcccctttgatctcatgctcgatctgctccaggatttctgtcactttctgcctgtttccgacctttatctcttctgtcagtgtttccagagattttataagattaatactgttgtccgttttcttttcttccatatccaaaaggaggctgcctcccagcagataccgatagccaatggctttctcagcaagcttataggaatagaccagttcctgaggtgatctcacccagcttccgattcctatagaagtttcaatcccaatcacttcttttactttctgctggatttcctgacagatactatgtattttgtctccgaattctctggatctgcatcctgtaaatataatgcatacccgattgctgccttcctgataagcaacacctgcattctctctggtaacaatttcatttcctatattaaaaagtacaaaggacatcagtgcgctttcctgctgtttatgcatatctacctgatacatttctgagtaagtgtccatatcaaaaacagctactctgtagctagaacagtcaaagctgatccccagctttttcagttctagaagacttacctgtacatctcttgtacaatttacaagagtctccagtgctttcgatcggatgacatccacattcttgtgataatcctttgaagtctgcgacagggattccatttttttctgttctttttttctggaatccagcttttctttcatattccggagcacttttgtcagttccattgctgtgacaggtttgagcatatattcacttacattataacggattgctttcttcgcatattcaaattccccaaaaccgctgaatataacaataagaatatccggataattatcatgaagaaactcgctcagttccataccatccatataaggcatacagatatctgtcaatacaacatccaccttgtggctctgcacaaattccactgcctgtctgccattctcacaatcccccacaagctcacagtccaggcttttccagtcaatgttctccctgattgcatccctgaccaggatttcgtcgtctaccaataatattttgtacatattaagttttatcccccataagatcaggcatcatccctctgcctgataacccaataaaaattactacttccttttacttatttaaccgaatcaggtaaaacctccgcaaagcagctattcggttataagcgaacagtaaagcaggtttcgaatatctgcgtgattcgctataatgataatagcatatttatactattttttcaatttttcaatatattttttgtgcatttcatacaacttcgtgtgttactgtttcctccgctgtaaactataaaaatttactctttttgcgtaaaatattgccttgaataatctgatttttttcattaaactgtttacaatgattttcagaattttgaaaggagaatacaaattatgttaaagggaattcctgaaattttatcaccggaattattaaaagttttatgtgaaatgggacacagcgatcgtcttgttatcgcagacggtaacttccctgttgaatctatgggaaagaatgccatcactatccgctgtgacggacatggtgtaccggaaatcctggatgcgatcctcaaactgtttccactggatacttatgtagagcatcctgtaaatctcatggaagttatgcctggcgataatgtagaaacaccaatctgggatacatataaagaaatcgttgccaaatatgacgagcgcggcgataaagcggttggaaatattgaacgtttcgctttctatgaagaagccaaaactgcatattgcattatttccacaagcgaaaaagctctgtatgcaaatataatgcttcagaaaggtgttgtaatcaacaactgactttgctttatcttttcgttactgttcacagtaacgtagccaaaattcattccagattgcctgcggcaatggaattttgacttgtatgtctcgggattttggcatattcatgccaaatatcatttttacacattatacacacatcacacatatatatacaacaggctggtatctgtacacacagatatcagtttgtttttttgattccccctgatacaaacagccgcccaaagtcagatcatctccaactccgggcggccgatatacattcttacatatcggttttatttattatttgtaaagaggtccataattcttgcatgctctgaaatctgcaccttctttatccattccaaatgcattccatgctgccggacgatagatatctttctcaggaacattgtgcatggatacaggaattctcagcatagagcacattgtgataagatctgcaccaatgtgtccgtaggagattgctccatggtttgcaccccagttgttcattacatcataagctgtcttgaacggtccttctttgccatcgcatcttggagcaaaccatgtacatggccatgtatagtctgtacgtttccacagcttgtcagatacttcttcaggaagagctactgtccatccttcagcaatctgcagaaccggtccaagtcctttcacaaggttcagacggatcattgttgcaggcatctgggcacgtgtttcataacggctggagtatccgcctccacggaaatatccgttgtcagccatacaccattctgtgttttccatgattgctttctggtcttcttctgtgatatcccaccactgtttcataacagctgttccatcagcttcttttgcttctccgttagcatcaaggcaggcagcaccggagttgatcaggtgaaggaaaccgccggcttcttttgctacgccctcaaggtcatatcctgtagctttcttaacagcctctgggctccagtatgtacgaacatcagcgaaaatctgtgctctgtttgtaagaagtttcataaacagcattccaagtccgttaagaacatcgttctctgtagccaggatgtatggttcacgtgctccgttccagtcaaaggaggtgttcagcatagcttctgcaaagtcaccgttcggatagaaatctgtccactgtctctgtccctggaaaccggctgccagagcattgtgtccgattgcttcttcagagaatttaggatcaagattgtcacagccgttcatcagttctttgatgataactgccatcttaacaacaaactcgaactgctcttctttcttttcagctgagaactgaagttcttcagggttcttgtcccagccgatcttacaggtttcttttgcccatttcagagctttctcaaattctgcgtgatcatagataccttctgtcatacgacggatgatctctacctcatcaacagactcaactctcattccaagataagattcgatgaaatcggaatcaatgatagatccgccgatacccattgttacagaaccgatctgcagataggattttcctctcatggatgctgctgcaactgctgcgcggccgaatcttaacagtttttctttaacatcttccggaatagatgtgtcatcagcttcctgaacatcatgtccatagataccgaatgccggaagtcctttctgtgcatgtgttgcaagtacagatgcaaggtatacagcaccaggtctttctgttccgttaaatccccatacagctttgatcgtctgtggatccatatccattgtctcagcgccgtagcaccagcatggtgtaactgtaagagtgatatctacgccttctttacggaatttatctgcacatgcagcgctctctccaacacgtccgatggttgtatcagcgattacaactttaaccggttcaccgttggaatatcttaaattctcttcaaataatttagcagctgatttcgccatattcattgtctgatcttccagagatccacgaacatccagtgctcctctacgaccatcgatagtaggtctgataccaattaccggatagctgccaattaatctgctctttgccataataaaatacctcctgataaattattgtaatattcccgcaggatcatttcctgctagaacgtgtctgaaaaaggctttctgcaagatgtgcgtcacaatttgtgagatattttgcccggatgagggcgccgtagcgggctacggcaactgaattcgggtgaaatatcccgcaaagtggggcgtgcagattgcgggaatgatttttcagacacgctctaacccccaagattacattttcacttttcgcagcatcttctgactgcaaatataacaaaaataataacctctacacctgttgtgccaagtagcccgataaccactgttcactccgttcacagcagcctgaccactcaactttgttactgatatctattatataattgcattcagaaaattacttgtgttataatagcaaaaaacagtacaatattcactttttctgttttaatcataaaatttctgtaaattttgtaaggaggaaagttcttttgcatgatttagaccataatgaagaccgtccaagaggcacttatgagtttccatttgagtttcatcacatcgatcatacacatcccagatatgtcatgtcttatcactggcatgtggaatatgaaataattcgtattctggaaggttctcttactgtcactttagacgaaaaaagttttacagcagttaagaatgatgtcatttttgtacatagcggaatccttcattcaggaattccccatgattgtgtatatcagtgcattgtttttgatatgaacacttttttgaaaaacaatcctgtatgcggagaatatatccagaaaatcctgcatcaggaaacaatgctttttccacatttttcagatgagcatccacagattctgaactgtatttctgttctgtttgatgccatgtatgaaaaagataccggatatgagctgactgtatttggacaattttaccacttttttggtttggttttcagtaatcattactttatcgaaaatcctacccgaacgcgcagagactataaacgtattttacagttgaagcaggttctggaatttatcgaaaaaaattatgccaatcctatcacacttcaggaactgtctgcttctgtctctatgtcaccgaaatatttctgcaggttcttttcggaaatgacccatcagactcctgtggattatctgaacagacagagaattgaagaagcctgtttacaactggcggctactgatgattcaatcacagaaattgcttacaggaacggatttaatgatctgagttattttatacgtacttttaagaaatacaaaggcatgactcccgggaaatataagcgaagataaatcagtacatcgcaaaaagaccagaacagctctcttcagaactgttctgatctttttaatactccttcacaactgtctggtgccttcaacagcggactgccaaatagttgtcatccatcttacaatatttcatttaacacagactgaccatactctgccagactatggtcttcttctcctgtaccgccgctgattccaagtccaccgataattgtatttccggacttcagcggaataccaccgccgaaaataacgatttttccaccatccagcttgtcaacgccataaaaggttcctccgggctgtgcgatcttcgaaagttccattgtagacatcttcactgccactgcagtataggctttcttcattgccacatcgaagcttacaaggaatgctccatccatcacatggaccgcaaccggatttccttccggattgcagaccgcgattaccgcacgctgccctctgcgcacagcttcctgctccagtctctcgatcagtttcttcgctgtatccaatgttatcctgctctgaattcccattcgtttaagaacctcctggatgacggcttcattgatatctgccgtcttttttaatacatctgtattactgtcggacggttccggcaatgcatctgtattattatcagacgttttcgccaatgcacccgcatgatcatcagacagttccactgaaagatcagagtaatactctatatatctcgccaaaatatacagataatccgaaaggcggttaagaaatctcttactctctgtatctgcgccaaacttcacgctgacctgtgcaaggcagcgctctgttcttctggcaacagtacgtgcaatatctatctctgcagccagtcggctctttcctgtaagcttctccggaacaggcttttcgcacagtgcttccagtttatctgtttccgcctccaacactgctgtttccttttcactgactttacagtcacgatcatatgggttactgactcccgctgcgatcagatcaagattcttttgaatacgttcaagaaactgaagtatttctgactgacggagcatactttttacaagttcaatatgactattcagttcatcagcctcacccataaggcggatacggtcatcagacttggaaatattaccggcatgagccatatctgtaattcctctgtctcctctttttgtataaatactcatctcttctccatctcctgtatctgatttcagcggcagtcagcatctgccggaaattattgtcttcattttcagaatgaccataatttcgtataaatctttataatatcttctttagtcggaactctcggattattcactgtgcaggcatctgcaagtgctgcgtctgccatcttgtcaattgctgcaaaatattcttccggtgcaattgttcccagttcctgaatcgtcagcggaatattcatctctttctgcataaactgaatccagtttaccagagaacggaccgtcattactttattataattgctcagtccgagaatgtgcgcaacattggcgtatctctttacagccggaagatactctttctggctcctactgtgcttattgatatcagaattaaattctacgatatgcggaagcagcatagcatttgcccttccatgcggaatatggaacattgctcccagctgatgagccatgctgtgagtgattccaagacctgctgtattaaaggataaaccagccagacaggaagctacatgcattttcttacgcgcatgcatatcactgccatccagatatgctctcagcaggaatactccgcaaatttcaatcgctttctccgcaagtgcagaagagaattcattatgtgcagtacttacgtatgattccagcgcatgtgtaaacacgtccataccagtatccgctgtgatggccggcggaacactccttacaagttctgcatccagaattgcttcatctgctgtaaggctctctgagatcagcggatattttacatgtgctgcagtatcgtttactactgcaaaagaagtaacttctgatccggtaccacttgtcgtcggaattgcgatcagacctacttttccgtaattgttgatcttcagtgcaaattctctgattgccttggaagaatcaatcgcagaaccaccaccgactgcaacaactgcttccggctgatattccaggaacttctttaccccttctgcaatcttgtccacaggtgcatccggcacaacgtcatggaaaatatcgtattcaatacctgcactgtttaaaggagcagtgatcagattgatcattttactttgtaccacaaatggatctgttataatgagaacccttttatacgggatctcttttaatctgtctaatgcgttatccccaaaatggatcgcggttttcatctcaaaagtattcattgtatcatactcctattttctttgtcagacaggatataggcattttacattaaatttctcaaagtgcttcttccagcgttctgtcggttctttgtccgtcactataatatctacttctttcatgcttccagctacggaaaacgctgtctgatcaaatttagaactgtcaacaaccagaattctctttcgtccggaaccgatcatcgctctcttggtagagccaaaagcttcctgcgattccataatcccccattccagatccagtgccttacacgaaaagataaccttatctacataataagaacgtatggattcgtctgtctttgatccaagaaaagccagatatccttctttcattacgcctccggtggagataatgttccacccggatacatcagctaactccagaagtatttccatggaattggtaattacggtaagacgttctttttcctttaatgctttcgccacaaaaactgccgtagtactcgcatccaggaaaatatgatctccgtctttcacaagggaagctgcaagttcagccattttctgctttcctgtaacattctggttcttacgtacattaaaaggcaaatcaatgcttacatcctcattgatcacagcaccgccataactttttatcgcaagtccttccttttcaagtttatccagatcacggcgtatggtctcttcagagacatcataaagctggctcagctcgctgaccaccacccgcttttctgcctgtaatttttcgagaatcagatttcttctctccagtgcaagcatatctttgccccctttttttgagaaattttttatgagtgtcagggtcagaaacttcttaccccggatattataaaatactgtcgatcattcttctgtcaggatgtgcgataacggaagaatccaggtacatacccttggcagctacaagttcttttgccctgtcaatggaagcctctaccgcagaaacttcaccggtgatcatcatatatgattttccgcacatacctttggcaatacgaagttctatcagatctacgatcgcagtcttagctgcctggtctgctgcttcgataatggaagctgcatcataagtttcaagaattcccagcgcactgatatcttctacctgagtagttccgtaaattgccgggaaaatggattcatgcggattgcccagcacaaagctgtcaatgcatttatcctcatatgtagttactgccgtatcaacggcggcctttaccgcacttaagtcaccggtaataattgcaatatatttaccaggacatacggtctgtgcctcgacgatctctacctcagatgtttttaccatagcatctgctgcagtaacgcctgtagatgtggttttaaattcaatcattccgattgctttactcattttgtgcacgtcctttctactttactgcaataataatgtaacggtctgttacttctgttactttaccgctgacagaagcatgaataccaacgcttaagccctgtgccggctgtgcgatcatctgccctcttgttacctcatcaccggctttgaccactgcctgtgcaggtgctccgatgtgctggctcaataatatccttactttcttaacctgtacaagttcttctttcagaggagcatccttgtcatatctcgtaagaccaagtcgcgccatcagacgttcttccggaaccttacggtattctctggattcctgtaccggtttcggctgtacaccctgcggaggacggatacctgcttttctcagaccgcccttcatatctgcgagaagacttctcggtgcaagactctgcggacatgagtacatctcacatacaccgcaggaactgcagaaggaagcatctatatatggattcaggtctctgaaatcattatttgatgcagccctcataaatttcgccggatcgatcggatgtcccagattatgtctcggacataaatctgtacaggtattgcactggcagcagatagatgctgcacgttttaaatctatagaagaagtccgctgtttcttcgctacaataagatggtcttttggaaggaccaaaatcgcatttgttgtctttgtcaccggatctgaaccatttccgatacgccccatcatcgggccgcctacgaaatagacaggatccttcactgttgtgctgcctgcctgtgctaccacttcctccagagtacatcccaggggaactctcactgtaacaggatcacttacttctgcaacaacagatacatatttgtctgtaaccggctgcttctcttccacagcacgatatacattgtatacagtttcaacgttaaatacggctactccctgctcgatcggcagtcctcccggccgtactactcttccggttgcctcataaataagtacaacctcatctcccatcggataaacttcgtccagaagatgcagcctcatgccaggaaattcttcaatatgctgatttaatgcatgaattgtctgtacataagacttcttaattccaataattgcttcagaagcaccaaccgtctcctggatcatatggaatgttttcataatttcatatgcgtgtttttccaataactgtctgtgtaatttcagtaatggttcacactctgcacagttcataagaatggtattggccttgtctgtaagcttcatataagtagggaatccggctccgccggcacctaccacaccattctgctgtataatatcctgtaattctttgatttccatggcgttactccaatcctgcaccgtcatcaataataccgacaattgcggcatctaccggtgctgtttctacgccgcagcctattcttgctgcgcttccctgtgccaccaatacatattcaccaactccggctccgatcatatcgatcgcaaccagctggctcaggtcgcctttcatatgatgcacaggctcgataatcataaatttacttccaatcagcttctcactctttcgtgtggataccacacttcctacaactttgcctacgatcatatgagcctccaaattgtttctgataataatattgggggcaaatacttctgcccccaattaacgcttaagggtttctgttcaaaaaccttatcgtgcaggcacgaacggctttttgacctttggcccccgatattatttaattattgttacggtagtgcctgtagcaatctttgctgcatttgcttcatctgtatcaatatgcatttccagtgtaaagctgtcgtctacacgaatcttgacctgattgaagatggttcctctctcattatctgcctttactgatacgatatcgccgtccttcacacctgcagcctgtgcatctttcggagacatatgtatatggcgcattgccacgatacatccctctttcagataaacggctccttttggacctacgattgcgattggtgcacttcctgcaacgtctccggattcgcgaaccggaacattcattccaagcttaatggcatctgtcgcagatacctcaacctgtgaagctttacgcaccggtccaaggattcttacattctcaatggcacgaagtttcagtcccacaatggtaactgtttcattagaagcaaactgacctcccatcagctctttcttcttcgtaagctgatatccgggtccgaacaatgcttctacatgttcctgtgtcaggtgaatgtgtcttgcggaaaccccgatgggaactatgaatccatcgccttttttttcattctgattgattgcctgaatgaccattctggtaatcagttcaatattattagattccaagaatacacctgctttctgtcaaatatgacggattataaccatccggcagtctgctgtgcagataccggacagttacgatggattactattttaatacaggcaggattttctctacatctgtatgtggtcttgggattacgtgtgtagcaactaattcaccaagtctggacgctgctgcgcttccgctttctactgctgatttaacagctcctacatctccacgtaccataactgttacaagtccggatccgatcttctctgttcctactaatgctacgttagcagccttgcacatctggtctgctgcttcgattgctgctgtaagtcctctggtttctaccattcctaatgcttcctgtgtcataactttttcctccttatgagatactgtttcctttatctgttctttctgggattctgttttatttgctgtttctgccgcctgagcttttacttccggttttgaagaagtttttgctttcgttcttcttggagcggctgcctttttaggggcatttttatctgcttccggtttcttctcttcagccattattcatccccctgattgttcttccagcgacttgcacttaattccaccattctgacgatttcttcgtggggacgtgcaattactgcataacttaccggtttcttgatcgcacctgtcgctgctgcatttactgcttctgtaacggcagatacatcgccttcaactataatagtaaccagtcgtccgcccagcttacgttcccatgacgccagctcaacgtctgcagttttgcacatgatgtccagtgcatcgattgctgcaacgacaccagtgatttctataaatccatatgatttactcatgagcgaactccttttttatacttctcaatctgctggtcagatgcttggaaggattttctctacgtctgtatgaggtctcggaattacatgagtagcaactaattcgccaagtctggatgctgctgcgcttccgctttctactgctgccttaacagctcctacgtctccgcgtaccataactgttacaagtccggatccgatcttctctgttcctactaatgctacttcagctgcttttgtcattgcatcagctgcttcaattgctgctgtaagtcctctggtttctaccattcctaatgcttcctgtgccatttctgcttcctcctgaatctacaaataaatatctgattatattttaactgatgcccaatggatatgcaactgctaatccttatccagggcgctgatcttcagcattttttccgttccctcttccgggttcgggatcacataatgctgtaccacaccagtcatcctgtttgcaacttccatgcctgcttccacagccgctgtaacatcagttacacttcctctgaatttaatgcagacaaggagcggtaccggcaggctgtcagcattggctggtttgtttttatcaaaaacctccaggcggacatttgctgccttacatccggcatcgcctgctacaaaggctgtcgccagcccgaatacctctaaaattcctacagcttctgccatttcttttctcctctattgccaggcttattatttgttgctactgttcactccgttcacagcaatactctttgcgggatattaccggtgaacagtaactatttgtttacaactgcgatcttaagtcctgtcattgccaagtttgtctgaagagcttcgttgatctgctctaacgggaacttatctgtgatcagttcagacatcggaagaccaattgcttttgctctcttaaggaaatcaaaggttgttacataatctctcagagtatatacccaggaaccaaccagattgatctctttggagcaaaggtcaaagtgcggattaattgtagcatctccaccattgatgaagaagccaagttcacaaagaccaccaccattgcggataaatttataaatgtttgcatgagctttcgggtttcctgtgcactggaatgcgaaatctgcaagatgtccgccctgagcttcttttacagcttctgtcagtgcttcgattcccttaaagttcatgaagttaacgcttgtgtctgcacccattctcttggcaaattcaagacgtttctcatttccgtctactgcgcagatatgttcaacccccatagtacggagtactgcaatgcagatcagtccgatcggtccgcagccctgaacaactactctgctgttgaaacgaagaattcctgttgtttttgctctctctactgcatgtacaagcactgcacatggctcaatgagaattcgggaatccagatccagatcacttacattaaagaatgtagttccgaagtttccgcctcttaagaagatgtaatcagagaaccatccgttgagatgtacatcatcgtcaggaagaagtccgtatacatcagctccgcctacgttcttcttgttcaggtcaaacattgtaatatcaggatcatccttgaagatcatacaggtaacaactttgtctccaacctttacaggttttcctgctgtgtcaactttaacattcttacccattgccacgatctcacctgtaccttcatgtccaagtgctaccgggatcaggttaaacggatctctcttaaattcgtgtgcatctgtaccgcatacgccgcatccttcaactttaaccaggatatcatcatctccgattggcgggattggatattctttgatgtcaaaatgctctttctcagttaatacagctactctggctgtcttcgggattccagttgatgctgccggtgcagaagctgctgccggtgcatttcctgtcatgccggagagaacctgtttcacgatttcttctatatttacattattcatgtccatgttctttctctccttatatcaattcttatcgaatacagagactgtctgccattacgcagcgtcttctcttggtgaatgtgcttgcgcatgtaaggccttcacctgtacggcttgcaatggtaaatgtacagtagccttcaccgccaaatcccaaagctgcataagacggtgcattcttaacaagaattgctgtatcaattgctttcgcatattttgtgatattatcaatattctttgaatgaatatgtgcggaatgacgattgccatgttctaaccagactgcctgctctactgcatcatcaaaatctcttgctcttacaacaccgaggatcggcatcatcagctcagtagtgatcagagggtgttcctttggcccctcaaatacgatacagcggatatttgcaggtacatttactccgatcatggaaaggagtgttcttgcatcccggcctacgcatttacggttcagctttccgcctgccagaacaacttctgtaagtttgtcctgctcttccttagaagcaagatagcagtcattctcagttacaagatagtgcatcagctcatctacgatagaggaaactgctacgatctctttctcggcaatacatggaagattattatcaaatgtacatccgtttacaatatctgtggctgctttgcggacatcagcggtttcatcaaccagtgccggaggatttccggcgcctgctccgataccacgtttaccggaagaaagaactgcagttacaactccaggtccgccggttgcagcgataagcgggatgtctttatgtttcatcatcacattgcttgtctcaagtgtaggtttctctacagtaactgcaatgttgtcaggaccaccgcactctaatgatgcttcatttaaaagattgattgcataaatggaagttttgatcgctgcaggatgaggattgaatacaactgtatttcctcctgcaagcattcccattgtattacataaaattgtttcacttgggttggtacatggagtgatcgcaccgatcacaccaaaaggtcccatctcgataagggttaatcctctgtctccggaccatgcagttgttgtaataacttctgttccgggagtcttgtcagctacaagatgatgtttgaggatcttgtccccaacatttcccatacctgtttcctccacgcccatacgagccattacttctgcgttttcttttattttcttacggatgcaggtaattattttttctctctgatccatggacatcttctttacgataagctgcgatttcttcgctgcttcgatcgcatcattcatttctttgaaaataccatgtttaccagtcggagcgtctgcaatctgcatttttgccattacttcctgtacaatttcctgtaccatattctcattaattggcatgagactgtcctccttgattatcggtcatctatactcttatttcattcctaactgagccattacctgttttgtgatctcagcaactaattcagcttcagatttgtctgctgttcctgctgccggctgggaatctccgccgcctacgaaatcatactgatatccagggaatttcttgaattcgccgtcatgacatgcgccgccgcagttatggcagttatggccatctttattcaggcagaggtttgcaggatgcttgcctgccataccgaatttacggcggatttcatacagtttcttaatgttcttctcatcaaattccttaggtccgccaagaacttttgactgatacagaagctgtgcgtagaactcaacagattccatcttcatgtaagctgcgtttaagtctgtgctccatgtcagtgctccatggttctcaagaagaactgcatcgaaatatggaaggtatttctcaagattatccggaatctccattgtagatggtgtaccgtattcagcgatcggaacgcatccaagtgagataactgcttcaggcatgatcggctgtgtcagcggaatacctgcaattgcaaaagatgttgcataaatcggatgagcatgcacaacagaacctacgtccggtctcttctcataaactctcatatgcattttgatttcagaggatggtttgaatcccgggttagcctggatcacatttccttctctgtctactttacagatatactccggtgtcataaaacctttagatacacctgtaggtgtgcaaagaaattcgttgtcgttcagttttacagagatgttaccatcgtttgcagctaccatgttgcggctgtagattcttcttccgatgtcgcagatctgttttttgatttcatattcgtttaccatgctcattttcctccttaaggcatttatatagtttttgacgtttctacctgtgattttacactatcggtcataaaaagtcaatacatttccgttgttttatgttgttttcacaggttttattgtgttgtttttatttgttttttctttttttattccaataatcgtatcagatgcaaaaaatgcctcatccaccgatctgacagtccagaccgcagaccgcatgtactgccttttttaatgtttccatatgttctttggacggtggttccacatttcccatcagatatggtctgccaagtccctcatatttatcctgtccaagtctgtgatacggaagaagatgaatcttgtccactccgggaagtgtgtctgcaaaccttgcaatcccctggatttcctccactgtatcattaaatgtgggtatcaccggtacacggattaccagcctggttttaccggaaagcgccacttttctggcattttccatcatcagttcattggaacgtcctgtaaattctttatgtttcgcaggatttgtatgtttaatatccattaaataagtatccagatacggtaagattgtctcaatcgtctcccattttgcacatgccatactctcgatcgcagtagaaatccctctctctttggcagctctcagaagtgctcctgcaaattccggctgacagagacattctccgccggaaagagtcatacctccgcccgagcggtaatagtataccctgtctttctcaacttcttcaatcatctccctgactgtcacatcacgtccgatgaccttgtcttctccctgcactttcattgtctggatcttatattcctgagattccggattgcagcaccatttgcaccgcaggacacaacctttcagaaatacgatcgtccttatacccggtccatcatgaatagaatatttctggacatcaaacactctgccctttgtatccaaatagtccatgcttttcctttcttattctgttatccatacatactctgcctgtcacttttacttcctgcaaaaacgtctgaatcagaagccctgttctgtacgacggatgatatcatcctgaagggaacgggaaagtgtcgtaaacagtgcactgtagcctgccacgcgtactaccagatgtttatatttctcaggatgttcctgtgcatccagcagtgtctgcctgtcaactacattaaactgcatatgcattcccttctggtcaaagtatccgcggatcagtgcaacgaatttctccagtccctctcttcctgaaagtgcggatgggtgaaatttctgattaaagagtgttccgttggatacaataaaatgatccagtctggatacggaagttgccgctgccgtaggtccctttacatccttgcccgcagatggcgaaacgccgtctgcaacaggtgtgtgtgcatatcttccatccggcgtcgctcctgtctgtccgcccagcggtacatttgcagatacaggatacagacctgcctggaactttccgcctcttggattgttatacttctgaagcggtttggaatatgtataggcaacttctcttgcaaaataatcaacttccggaatatcatttccaaatttcggaacttcatcgatcatatcgtggatttctttgaatctctgtgtcttctgttcacccggtttcattcccatgaaagttttcagaagtccttctgcagtggaagcatccacatttctgcctgctttctgcattgccttcatgatcatctctgtcatatcaccggcggactgtgcgtccagtcctttatcatagttccatgcaagagcttccttaagttctttcatagatactttcttatcctcatagaccagtttgcggattgcaaaaagtccatctgccatattggcgattccaaatccctgaggacctgtaaagttgtaaacagctccaccttcctggacagacttgccttctttcagacagtcatctatcatacaggaaaggaatggtaacggacagcgttccgcatgagctacatcaatagcattatctgcattcaccagcagagaaatgcagtattccatctgtttcttatatgcgtcaaagaattcatcaaaggtcttcatctgagtgacatcgccggtagggattcccaccatctcacctttatccataccattcgaaaaaacaagttccagaggtctgcacatattaaagaatgcggcatcatgccacccttctgtcttaccggctttctgcggttccacacatccgatgatattgtactctctggcatcctccagagataagcctctgttctgcagtgccggaataatcacctcatcattgtaatatgcaggaagtccgattcctgttctcgtaagctcggctgcctttatcaggaattcatgcggagaaccattccatactctcacagaaagtgatggagccggaagatgcacatgcatggatgcctgaatacacataacagaaagatcgttagttacatcctctccctctttattctgaccacccgcgatcagattctggaaaaggctatatcctgcaaatccttccgctgaagccgcatcacgacatttattcaggtcatttaatttaacccagatgcaatccatcaattcctgtgcgaactctcgggtaatagttcctgcttccatatccttcttataatatggatacatatactgatcaaagcgccccggtgaaatagaatgtccactggattccatctgaagaagctgctgtacaaaccagaatgactgacatgcctcatagaaattctgtgcaccctttgccggtaccctgctgcagttctctgcgataacaaaaagttcctgttttcttaccggatcacttgtctgtgccgccatttcctgcgcaagttttgcatatctgcctgcataatcgatcaccgccttacagcttaaaatcactgcctcaaggaagtgagactttcttgcataattaccgtcaccgacactgcatccatccagctctttctgagccttctccatgattccctcaaaaccggtttccagtacttcccagtatttaactgttacatgtcctacaccattgtaaaaataatttccaggtgtaaaaatattgtgttcaattgccttgattgcttccggtgccatataggaagttgcaagttcactggttgttttccctttccaatacttatctgcctccttaagttcggctttggtctcctcagcaatctcaaaaggatccgcagttctggtcgcaactgtatccagttcagcttccagccactcataagagaactccggaaatgtctgacatcccctcggcgcaatcgtactgcttccgacaatcagttcattgtcacggataatgatcggaatgttatgaagaatatgcgcaaaagcctttgctctgcgtgtgatgatcggttctccttctgtttccttataagattctgtgatcagctttgctctggctgattcgatcaccggcatatgttcatacaatgcatctaccagtttctgaattctgggagacttgggaatatctgatgtttgaaatttttccatgttactcctttctcatgaataaaagctgcacccataccagaccccaatacattccggtatcattctgacagcaatatcctccatgttttcatatagattcattataccttatggctatcgcgaagtcaacataaatcaatatatatatcccgaacttttatgttgttttttatttgttttttcttctgttctggttgtttttgttttgtttttatgattgacatttcatttttcttcagacacgttaaaagcagcatatcaggttatgatccataactctgatatgctgctttttaatatcgtatattgtttttttctgcatcggatgactttaatgagcatgcttttccatcgatgcactcccatatattcatatgcacttaactattgtttcctgttctctttttgttctctggcttctcttactttctccctctgtttcgtcagatcgtaataatcatctgtaagaaccccatgttttcgcatcatatcaaacacagtctgctgagcaggtgtcatcttcatgccaatagaattattataatccgtaagaacgcatcctgttttctcaatcagccagaacagcggagaatcatcatccgggatcattttccagatttcgttctctgtccatggaagcaattccatcattccatgaagatgtcctctgggtattcttacgtaatcgccgtccggcttgatcagaccgtcagaaaagttctcatccttaattttcatctcatttaacagttcttctgttatcttcatcctcttttcctcaccctcgagtattgcttttttctattatacgtttcccgccagagttacgcaagtaaaaagtctgaatagcctctttcctcaaaaatatatgttactgttcactccgttctcagtaacatagccaaaattcattccagattgcctgcggcaatggaattttggcttgtatgtctcgggattttggcatattcatgccaaaacacctcgcgggatagtggtgtatgaacagtaacaaatatatcacgttctataaaattccatcttgattaaattgcaaaaaaattgtagactatatatgcacacacattaatagtttttgttaattaagactgatttgaggtttcctcataacgtctcaattatacacacacattttctaaaaagagcagctgcatcatccgatgcgctgctcttttagttccactgtttattttgtaactgttctctgccgtcgacggcattctttaatgattttaactcttactttttcttcttcaggaaataaataagtaaaattatgataacaataatcccgataccactaatccagattacaggattcttcattcctgaatctgcttttacattctttcctgatgttttctgactctgcttatcatcggattccttgtcttctgtcgaagcaggcgtctctgtttcttccggtgttggcattgcttcttctgtaggtgttgcctccggtgtcggtgttgcttcttctgtaggtgttgcctccggtgtcggtgtcactttttctgtaggtgttacctctggtgttggtgtggctttcggagttggagttgcttccggtgttggtgtaacagcagccaccggaacatttcctgatgtgcctgtagcctccggtgcatctgcggatacattttcatttacgtaatctgtatcacgatcaagattcagccatccctgtgtcacaccatctgtgtctgttttcccccagtttgttccgtcttctccctgaacatactgaaaaatatgtacagttgtcccatctgcgattccctctgttcctgaaacctgatcaaatttctctccaggtccgttataaaccgatacgtttccatcgtttccatgaacctttacttcgaaatccacatctttgcctccgaaagtacgatattcctcattggcagcttcttctctggaagccggatccagatcatccataggaacatatccgttcattccatggtactgtgcatatgcccattttttattgtctgctccattcttctcacccagaacgtgaatggcagttccatttggaatcttgctgtcattcagtttaacactctgagtgtctgcttcatcataaatatctaccccgccctgtgtactctgtacgatcatataataatctgttacataatccggattctgaccctttccgtcatccgcataaacagaaaccactgtcagaataaagcacagtaccattgctattactgttccaaaccttctcttcataatctctttccttcatttcttattttctttttacagcagatgaacttttatatttgctgtatgtatttccatatggctctttaacatatgcttttaccgcataatagtatgatacacctttttgtgcttttttgtccagataagaagaactatttccattggaaattttctttatcaattgataggaaccaccttttttctttctgtaaatataatagccgtcacattttttctgaggcttccaccggatacggattccacttttctcagatttcacagaagtaaccttctgcactgcaggtgctgctttaatcacatcgccggttttatatttacctgaatatctttttccggatgcttcataatatgcttttactgtataacggtatgatgcattagccgtaaccttactatctttatattttaattccgatgtcccgacatctgcaattttggaccactttccacctgctgcaggttttctgtacacataatatcctgtagctccggaaacttttttccatgaaataaggttgtatccggaattatatgccttcacctgaaataccggtgtatccggcacccatgactgattcagggtccttgtatgtgccttgatccttgccgtccagtttttcgtctttccatctgtccacctggccgtttccgatgcactcttatagaatgtctgccctgtttctatccccgccgtacaggtaaaccagtttccataactggactttgcttccactccaaagctgattttgtcaatcccactgtttgtgatcacaacagaatatctgcttccctgtttcaaaaccacctctggcacactgatagtctgtacacctgcgattggctgttcaaactcatatggagcagcatatgcagcggtcccgctttccgggtcatatggatctgtcagatcggtgtatatctgaattttgtaacaggcattgtcactgtttgtaacaagattaacctcccctaggacttctgcttttccctttcctgcagttgtctcataaactgctgctactgactgtcccgcctgtatcggaatcactgaaagtgctgaagaaccatcataaaaataattattcctatacttttgatccaaagcagccactgcctctgcacttacaagtttactgatattgggatcctgataagaaagatagtaatatcctccgtctcctttcttctccccccaactgtttttgatgatccacgcaccatcagatgttacattggaaacaggaaggaaattatcctttgaatacgtatcatcccatccgaccactgtcacaatatgattaattacagtcgaatttgattttccaacaggataacaatatgcagctgtgtccggatttgcataactttccttcatataaagcataatggatactgcatggtcattcagcagcatttctttcatacgttcctcactgtatttggaaacagatgcatttttcagatatgctgcagaattataagccttactttccggaatctgtacagtcagatcattctgatgcaaagaatccgtaggaaatggtacatcggcctctgtggtcattcccgaccatgtactgagataaatcgccgccaggtgatcattacctcctatcacgtgataatttcccagtacataattcttatcatcaggggtatttccaagaggatcattctgtctgttggagaaaaaatatgataaatgttcttctgacagatcgtaggttcctttgttctgtgccagaagcgaagtctccatgattgctgccataccaaaagcccagcaggttccaaatggattctgattctttacgggcgtaactaatccttcctttctggcatcataggaagatggaaatgcagcctccctgtttccatatgcagcataaactgatgtcagatcactctccacttcaattcccggatccaaaggttttaaatttttaaagggttccagttcttcctttctttcctcttccgtcaacggacggcccttaatatacctgattccgtctgtaccctcttctgagttttctccatcctgaaactcctgttttgcatcatcgcttccgaacaattctgcatccgatcccgtatctgttccaaattcatctgcctgtgaactttgaaattctttcagatctgatgtattttcttctgtctctctgttgactccggatccaaacatttcctgacccgcagcgggtaccgatgtacaaaccattgcataagccagaaaaactgacaatgcgcgtatcgctgtatttctttttttcatgtagtagttaactcccttgcgtaaatataatatcattatatcagtatcttttttgtttttcaaccatgatcaatgacaaaaaccgtcggaaaacagtaaattttccctgttttccgacggctctatgtagaaatgcagagctctgccgacaagaaaatgtcgccaggaaaagacgtcaaatgcctgtgatgcattttcttctgtgcatgtgaaaagtgtggaaaatgtgtgtgaaatgctttatatactaactcagaacagacttgaaaatcttacagactcttctcttttgctatccttattctagcagaacaagcattgtattacaatgaaaatcgttctttcttatttgtgctaatctgacacattgttactgttcactccgttctaagcagcgacgcattctcctcttatttgctgatactttcctttgctcttttcatcatatcagccagttcctggtattttcctgtgacatatccatagttttttcgcttatgcggaagcatacagtttgtgcagtctttaattcccttttccgtataccggaaattcccaccgcatttctcacccagggcatatagcgggcaataacagaacagacagttaaaatcatccggatctgcattcttatgacacggaaaaaattcacatttcttatggctgaaataagaatattctttcccttcccaataaggtttctccattgctacctctcctctcctgttgcaagtttttatctttccagaataattccgttttctcagtctccatcaatcccacccatcagaggacgaaataaaaaaatactctaataaattatcaatttctcttcacataacaaagcattgaaaattcattacagtatttttcacagatcatacatttaaaattaataagagggagcgatgctaccccggggtagaaaaaaatccgttcatgagtgcgcggagggaacgaataaatccgaagtagtatcgcctgccatttaatcatgtataattcataaagaacaggcgcattccataaaaaatgtctgccttcagataaaagcagacaacactccgaagctgcggattcaacggagttggttgttacactttacacggaagtttaacctcgccataccaagcaggtttcctggctccaggctcatcgctcctctctccttctcatgctatggcacaatggacattctgagatttgctcctctgttacagtgaccggatcgctcaggtttctcacctgattccctctttctgtactgttctttctcacagtatcagcacttaatatgttctgtatggaattatactgtcattataataacaccctgcaacaagcttgtcaactatttatcaatatatttttcaatattccacaccttccggcagcggatcccattcattcagaccaagactctgtctgaattttgcttcttccagactcagctttggaacatcctcattcaaaaacgctctcagctcatcaatcccctctccggtcacattgtttaccagaaaaattctttcacatcctgcattcagcatccactgacgcaccattggaacattcgcataaggagaatctattttcgtaatgattcctatcagtggtctcagaataaatgcattactgccatagccaaacaaactgaaaggttcatctgctgactgtaccattgccaccacatctgcttcaaaagaaaaacaggccagccctacgctgaaatgcttggactctgcatactctcccggagaatcaatggtatcatcatccgtattcgtatactgcgtttttacataatgaagtttttcgccttttaatgcctgagttaatgaagtcttacctgcttcacttctgcccatcagaaatattttcttcatatttaatgtctgtccctttcacttctctcagctattccggcagttacataagcaccatcggtacagaataactgacttttcgtatgttttaacttttgtgaactgcacaagtcttaaagccaagcacctctctaaaaaatttcaccacttcttccactgcagtctgaacttccgtcagacctcccgtaaggatcaatgatccgctgaagcgatccatgaaaccaatctccacatttgcacttttcactgcaatatcagcagctacaaccactgcttcccatggggtaaaacgaatcattccgattgcttctcctgtgtggtcttctccctcatggactccaatatgcagaccaagattctgataaatacagctctgtgaaggattgatcacatgcgccaggcacacttcctttcccggaacccttaccctggtcatacgcagcttttttccctttaatttctcataatcctggttataaagcttttccagtaattctctggttgtcatccctgccatcccaacacttcctatcttttggtaatcttgcagactacataacccagagtgtctctgaaataatccacaacctcagtcatcgctgacattacatcggaaatctctcccgtaatgatcagtgtgcctgtaaatcgatctgcaaatcccagataaacatttccgctttttaccgcaatatcagatgcgattactgcagattcaggcggtgtcatattcataattccgattgcagatgaacggtaatccacctgcggattcagtccaagcttctggtatatgaccggagccggccctcccattacatgtgcaaaagtaatctccttgccagcaaccgtttcctgtacaattcttatgtgttctacatggtcatttgccatttatcattcctcgctttcactattcaactataatccggataattcatgagaatattctttcccactgatgtctcctaaaacagatttaaaattttatatgtatctcttcagttacataaactgtactatccatccaattttatgtcaaggtaaaatccacctgaaaatcggtaaaatattatacatggttacggttcactccgttcacagcaacacgcttcgcgatgcacagaatttatgctaatcgcataaattcgcgcggtatgtctcggaattttggtatattcatgccaaaacacctcgcggaataatggtaacttatacataaagaaaaggagcatcagcccccttagcgatactccttttcaacccctataaatttaattatttatacttatttaattataccagtcttcttacagaaacaatcgttctgtacgctgcgttatcactgatcttaattccatctacagagttcgatgcatgaacgatacgtccattccccatatagattgcaacgtgtccaccgtagcagatcaaatcgcccggctgtgcatcagcataagatacttctgtaccggcattctgctgttcataagaagttctcggaagacttactccgaagtttgcatatacactctgtgtaaatcctgaacagtcagctccacctgtaaggcttgtaccgccccatacatatggattgccaacaaactgtgttgcaaagtctactacagaagatcctgatcctgaacctgaagatgaagaactatctgaatcagatgactgttcactctcataatcatctggtgaaactgtattatcagaatcaatcacattgccatactcatcgtactctacatcatcagaagctcctgcattgtcaacaggatcaccattttcatcatattctacaccatcatctgattcagactcatcatccgcatcatcagtattctcaatctcatttccgtcttcatcatactctacattttcttcctcttctgattcggagtcctgttcctgctctgcagcttttgctgctgcctcttcttctgccgcctgtcttgcagcctcttcctcagcctgtcgtcttgcctcttcttctgctgcgattctttcagcttccaatctctgaatttcagctgtctgttccgctaacagatttgcatattctgtcgcctgctgctgtgcatatgcaatttcattctcataatcggctgattcagatttcttctgatcgatctggcactgaagatcataagactgctgttcataagaagccttcatctcctccagttctgctttgtcagattcatactgagtctttaaattatttacctcattaatagtattcacatatttatcaaggttctttctgtcctgctcatacatctgctgtgtattctcagcacgtgtcagaagttcactcaaatcttctgaattaagcatcatctgaaaccacgctgcatccccaccctgttcatacagtgcctgaatacgaagcttcatgctctcatactgcttatctctcgccttctgagccttagccagatcctgttttgtcttaataatatctacttctttattatcgatatctcctttaagagtatcaatagaaaccataacacttacaagattggaatccagttcggaaatctcattctcaagctgtgatttcgcatatgcaagctcatccattctggaatatgtcgcatccagctgctgacttgtgatcgcctgctcttctctcaattcatcctctcttgaagcgcttacactaacaacctgtgttgcgctcatcaggagtgctaatgtaagacatacaattcttttcttcatgaattctcaccctcgtaacattttctttctatatcttaatgtttttgcaatatctaagttaattcttatacatattaacacaccacactcaaaaacgcaaggattaattaccataaattttatatttctgtaacatttattaatctttttgttattcttcgcatttctttctacaattcaaacatattccatttcatgtttgtaataatttgacacaggacaaagatatctgatgcagggttactgttcacacaccactatcccgagacatacaagccaaaattccattgccgcaggcaatctggaatgaattttggctacgttactgtgaacggagtggacagtaacgtagcaggacttcacgctatagtggactggattgtttgcattatttatggaattactacagaacgcaaaaaaagaagcagcctccttattcgaaagctgcttccattttcttaactattcacttctcagctaaacagatctgcaagaatctggtctgcggtcatattcatatatccatccggatcagaaagcgtacttctattccatctcagataattacctcttctgatatagttaccagatgaagtatgataatcatatttggtatatcccggatatcttgacatatacttctgtgccagtgcaatcgcctgactggaataaccaccggacggagtaggtgtacctgcaatctgaacacctgcattcggggtagaatgcacgatcactgcactcttatcagcacactgtccgagaatgatccatgtatgtccactgtcatatcccacatctccgggatatactgtccagtcatcacttgccagattcgcctgagtgagaatacttccccagcccatggacttataataagaaccaatctcaccggaaactaccgtatatccgcttcctacaccggacttactctgcattacctgataagctgaccatcctacgaaaccggaacagtcaaaaccttttgctctgttggctgtgctgagatctctgtagttattgtaatcataactgctgctctgactgttatagaaatcagtcattgtctgacttgttccttttctggtggaatcattccatccgccaccccatacgtacagagcctgaccaacaggctgtaatgcacctgccagataattcttgattgttctggaaccggtcggacttgtagtattgctcaatataccattggaattaaaatggtatttctgtccatcaattgttacatctccggtagccatcacaccggtttccttatcaaaataatacttatttccgtcaattgtcgtccagcctacagccatcttgccgctgcctgtattaaagtagtatttctttccatccagtgtctggaaaccttttgccataattccgtcttcagtttcaaaatatctgtattcattgctggaattctttgtccagccggtaagcatataacatgcacttgtaaaatatctggtatttttcttactgtctgtaaggaatgtcttgcaggcagccactccactgttactgtagaaataatatctctttcccttcaatgtcagccatttcgtctgcatgaatccggtagatggattaaaatatcttttctgatcctttgaatcagtgacccagcctgtcatcatgataccagcctgtttactgaaatatctctttcgtcctttactgtcagtaacccagccttttacctgaacaccggtctttgtgttaaagtaatatttcttcccttcaagttccagccaacccttctgtttagagccatctttatttatgtagtatgaatctccgttaatagttacaaaacctgttttcgttgcagcctgtacatttgccgcagtaaaatacatggaaactcccacagcaaaaaacagcagaaacagaagtgccccccagattttaaacttcctgtttacgttttgcatacataccttccttttcttttttcgttatcagagcgtgtctgaaaagtatgaatcgtaggtatcgctctgatatctcacatacttctcagatacgctctaaggtttaacaaagttttttacaatgttgttacgtttctatgaccctattatattacactttaaataacccgtcaacagacaagtaaaattctgttaaacattcactaatttttcacagtctgttccataaaaaaagagacaaagtccacaaatactttgtctcttttcacaagataacactgtgaaatataacctgtatacctgttttctctttattttttcaacagacagaatattatcttatatccctgatcacaacagatgctttcttaattcagcaccatcagcagcacataaataagcaggtgccacatcaaatacggtcttcgcaccactctgtccttctttattcatacgatatgcagctcttgcatatgcaacaagtacagaagatgtaaactccggattggaatccagcttcagactatattcgatcacatgattgttctcatcattccagcccgtttttccggatcggatcacgaaaccgccatgtgggattccactgtgatctcgcttcagttcttcttcagaaataaaatgtacagttgtatcatagtcagagaaatagttaggcatagtcttgatatcattctcaatctgtgccagatccgcaccttcttctgcaactacaaagcattctcttgtatgtttctgtcttgttgtaagatccggattttctccgtttctcactgcttccagtgctgcttcaacaggaattgtatactgttttgcatcttttacgcctttgatacggcgtactgcatctgagtgtccctggcttacacccttgccccagaatgtataatcctttccgtttgtaaggattgcatttgcatagagacggttcagtgagaacattcccggatcccagcccactgaaataattccgatatgaccgctttcttttgcagctgcatctactgaatcaaaatgctctggaattcttgcatgtgtatcaaagctgtcaattacattaaacatcttcgcatattccggtgtctgtttcggaagatctgttgcacttccaccacagatgataagtacatcgatcttatctttcattttttcggcatcattgacagaatataccgctgctgtctctgtaaggattttaacagtttccggagcacgacgtgtaaatacagcaacaagctccagatccggattatgtttgattgcgcactctacaccgcggccaagattgccgtagcctaaaataccaatacgaatactcattatgatttcctcctgtaaccttaattatatgtttgcaactgttgcatatcattacagttgcacattatcactttactatagtaatattttcacttttaattgtcaatccaattattaccaaaattccattgccgcaggcaatctggaatgaattttgactacgttactgagaacggagtgaacaataacgttttagcagcaaaatatgccgcttcccgggcaacacagactgcatgccatatttgccaggcacagcttcatacaataatcatcaccgcctgtcggcatacctccaaaaggattctgcatctcctgataccagtttcctccgccttccatctgctgcaaaaccatctgatactgtacattatccggttccagacggatagcctgcttaatatcattcaatgcatttacgttatttccaagtcccatgtttgccatggaagacagataataccactgtccgttcctctgtgaaagtgactgcagaacattcatagcctcacgataatgaccgctctggatataattggctgccgcctgcctgcgcatagactcttcatcctgatagccagagtctgcctgtccggaaaatccgccaaaaccaccgtaattattgctgccataattcccgtaatcgattccctgctctctttccttcataatctgctcataagcctgctgaacctgcttgaatttctcctcagcctgttctttattcggattgtcaatattggcatccggatgatactttctgctcatcttacgatatgccttcttcacttcctcatcggatgcatctctggaaatccccagtatactgtacggatcaatcattatctttctctcctgcttcttttctcttcttatgtatcacctcaaaccgacaccatacccctgagtaaagaatatttctcaaaatatcagtgtattttataataggaagtttctcaaactccctgcaggtctgcgccatcatcataatcagaatccggcgtacctgctcatcgaacccttctattatatattgttctgaaaaaggattgtaatttttattttttatatcctcttccacatcatcgtatgcatccagaagataaataaatttgccaagaaaaaatcccattctgcgcagagtatcttcccatacatcctgtttccatgcaaaaatctcttccataatttttccgaaacagcccgccattttgtcaatgtctttttctccggatttctccatctcagacaattcactgagaagcttctgtattcttcgggatttatccggatatttctgatccagttttttaacttttccctgaagaacttttgaataaccaagagcagttacttttttttcatcctcccagtcgtcccggcatttataataagtaagaagtacattcatatctgccgcatattctgtcactgtatttcttctgaccggctgtttacataccggatgaatgatacatcttgtgcttcccttttgtgtgcgcggctcataaagcgcactgagaagaatcaccacaaatgtcatatcataagtcagagaaatctgtcctgatattccatatttacttttgagttctctgcacaatccacagtaaaaggatctgtacagatcaaaatctttaaacttgatttcaggcttattcattactatataaccaaacataattcctccagcccataacttatgatgatctgccagagcgtgtttgcagcaaatcaacgtcttttgataaacttctcatgacatttcggacattcaatctctaccttctgtccttttcctctgggaatacgaattttctgtccacaacccgggcaggtatagatatgatgtgtttttctctgctccatcatatttttttctctggtaaaccggctgcggattttctgagtatatcccagatatttctggttttccgcatatcgtgcagagatatttctggaaaggattctgaaatatgtataaatgataagaataaatccaactgtatccagaacgcctccggctgcattttgtctcataaaagaacctacaacaatgacgaaaagtgccacaccgagagtgaatcttgcaaaattatccactccataacgcccctgcatgaatctgtttaatttgtctttcattaaactacctctttttttactgtttgtaatgcatttttttactctctgacaagaactttcaggatctctgcaatatacatggtatggtagtctttctgcggataccacttaccgtcgttttccccggcatcaaagcattccggtttaatctcatcatgatacatttttttgcagaccatgatcatgtcagcttcttcaattccggctgttccgtctgtaaagtaaggagtcagtcctgcttctttaatcttgttatccacattttttccggaaacctttccgcaataatttaatgccttgcgatactcttctcccagaacagaaattgtaaatgtatcttccctgtccacaaattccttggtgtatctctgaggacggatatacactgtcactgcgttctttccccacataacacccattgcaccccagcttgctgtcatggtattgcatttttcttcatttccggctgtgatcagcagccattcctttccaatcttggtaaatggattcattgtcagttcttctgcttttacttctctgaaactcataatattatttcctctctttctttattctcaaacatccggaatcctctgctctgctacagaaatccctgttttctcaaaaatcttatcgtgcaagtacactctggctctgatatcatattatataattatctgtcattgcatacctggaagatatagaacttcagataataagactcatctgccgcccacaggattggatgatccggtgcctgtgtcctgtattctacctggcgaagtcttttatgtacattctttgctgcctgtccgatggttttggtaaataattcatagtccataaaatgagaacaggaacaggttgccagaaatccgccgtcttttaccagtttcatggcacgcagattaatctctctgtatccttttactgcatttttaatggaatttctggacttggtaaatgcaggaggatcaagaattacaacatcaaatttctcacctttctcttccagctcagggagcagttcaaaaacatcctcgcaaataaatttcacattgtcggataaaccattcaatgccgcattagcggttgcctgatctactgccagctgagaggcgtccacaccggttacgctcgcagctcctgcaattcccgcattcagtgcaaaagaacctgtatgtgtaaagcaatccagaactttcgcattcttacagagcttctgaattgcaagcctgttatatttctgatccaggaaaaatcctgttttctgcccgtcttttacgtcaacttcatattttacaccattttcttcaatctgcacaagtgttggaaactctggtcctataaaacccttaaccatttccattccttcctgtttgcgcaccttcacatcgcttctttcgtaaacaccgcgaatagtgatcccatcttctgccaggactttcctgaggagttctacgattgtttctttaaaacgatcgatccccagagccagtgactgaactaccagtacatccgaaaatttatccaccacaattcccggaaggaaatctgcctctgcaaaaatcagacgacagcaccctgtatctaccactttcttacgatattcccatgcatcacgtacacgcttctccaaaagttcttcattaatatcaacattttcatctctggtcataagacgcaccgtaatcttagaattagtattaatgaaccctcttcccataggatatccgtcaaaatcatggacaagtacaatatcaccgttctcgaaatttcccatgactgtatctatctcattatcaaaaatccacattccgccggatttcagaagtcttccctctccctttttcagagttactactgccattcccattcgtatttctccttgtatttttatgtttatcttttgtcaattatatgactctgttttctatagcagccctcataaataagttactgttcactccgttcccagcaacacgcttcgcgatgcaggaaatatgaacctccttgtgcaatgcccaaggagtatcgtttgcttcgcaaacttaatttatgctaatcgcataaattcgcgcagtatgtctcgggttttctgtgaccttcgctcacaaaaaacacctcgtgggatactaccagtgaacagtaacataaataatgcatttaagacagtttcagatttcacactctgatgggccggattaagattcattatttacgaggattgctataatcacattattttatcacattcatctcattttttccatacataacaaaaagcagccggcaaaatcacaaaaatttcaccaactgctttccattgctattattgtttgctgcttttcacaacctgtgcaggggacttccctgattcggttaactccttaagaaggatacatcttggcagacctccgtaacagagtgccgttctcttaacttcatatccatggatttccatattatgtctgctgaactgattatccggatgtatggtgcacatcagataataatattggtctgtatccagcaatctctccgcttcttccagcatatgcccctgcagcccgtttcccctgtatgcacaacacacaactgccgaatccataactgcaacatgggaaagctgttcctcatcaaaatcaagataagttcccagattatcttccctgttttcaggatatttaataaggaagaaacccgcaacagaaccatctgctgtctgtgccacgatcacaaacccctgttcttctatatgtgtcctgacatattcctcatcatcagatacaaaccagtccggatgctctttatcattcttcgctccatgcataacagccatgatctcatccacatctgacatctctgcttttcgtattctgaacaatacctttgcagaaccatccttattctctgaaatctgcatgatactttgattattctgcattttcctcgccgcctgcagtctctgtggaatctgcatccgttgtatcataagtctctgtgctttctccgtagagtttctcaaagaacttcattgtttcattatataaggtctgtctgtcatcatctgaaagttctcccagttccggacttgcctgtgcatctgcacttaatccgaagatttccttcatggacttatctaccatattaagttctgtactcatgtaagtttcggttccatctgcctgataagaatctgtaccttctgtaagaactttcagatatgccttctccacattcttagcaagagttgcaccattttcagcatcaagagttacggaagctgttgctgtttcatcttccatagctgttgtaagagcagtggtatcgccttcatattctcccttgcagaaattctcagctttatcaaacatggccttctgatcttctgtcagtgcagaagtatccaattcatctgatgtggtatcattttctgtatcatctgttccttcatcggagtctgtatcaccttcatctgtatttccaagcgtactgtcatccgtagtttcatcaccatccggctcctgcggttcctctgtttcgctgaggtctccgtcactctgatcgtctccgtcgtcctcaatcagacctgaatcctcctccagcgatggattctctgtggaactctctacgatatctccgcctaaagcactgttatccacattgttcaggatatcatcaccatctgcggaatcacctgcatttacagtgtcatcctcttcatcatcaatatcaccaagctcatcattatcaccggatgtattctgttctacctgctccagtgttgcttttacatcatcataattgtactcctgctgcgcaatctgtttcagaagctctacgatcttattaatctggtcagaatccagatttacattattctgctgagcaacatttactacgatattatagatatcatccacattctggacattatctttgataacctgtatcttggagttattcataacagtagttgcatcattctttccaacctcatcagccagatttcctgttactaccatttcctctgtagcaagttctttcttcgtgctgtcaagctgctcacctgtagctgtctcatacgccatctgaatacctgtaagcgctccggttccggatacctcaaacgggcaggctgctaccacttcacagttcttgacacctgatgtggaaagtgacgttgcgatcatgttacatgttacccagttaagattggctgtccttactttgataccgcctgactgagtcggctttacatatgcacagctcactgttctggttccgatctgctctaacggtacataagcactcagatgatctctctcatcctgattagtgatagtgagaatctgtacctggttactgtctacattaaaatatttcatcattgtattcttctggtcctgagtaagatcagctcccagcgtcacaaccttcactgaatctgccattgtcggtacagcagttcctgaaagtaccagacatgcactgcataaaagtgctgctgctgtttttacttttttcataatagaaacctccctgatatgttatttaaattattcaggcggataatcatttcatgcctgttcattgatagtagtattataacacgtttgagttgagatttgtaattattatttatatcattcccagtccttccagcaggatttttgtacctatgaggataaggataatacctccgcataattccgctttggatttgtatttcattccgaaaagactgcctatctttacccctgctgctgaacagacaaaggtgatcacaccgataaaggatactgctgatacgatctctactttcagaaaagcaaatgtcactcccactgccagtgcatcaatactggtagccactgcaaggatgaacatggattttatatccatatccgcatttacatgttcttcctctttcgattctttgatcatgccggcaccaatgaacaccagaaggacaaaagctacccagtgactgtatcgagtaaccttatctgcaaagaatcgtccgccgaaatatcccacaaggggcattaatgcctgaaatcccccgaaccatgcgcctgcgatacacatatgctttgcattgattctgcctagggaaaggcccttacagacagatactgcaaatgcatccatagacaggcctatcgccagtataaaaagttcaaaaatattcatgtgttttttgctccttttcctgtataaaataatttttcagtgacatagaacccttcccggaagacttttttatgttatctgaactgctgtaatgttcctgcagcataaaaaaagagacacacagacagctgttttaactgtccatgagtctcatcgtttactgtaataccgggtgcatatggcaccattatgtcgatagtactacacactcttcaaaacatatctgaaaaatgttccggaatatgccgattactccctcgcggagaatggccttattttatcatattgatctatatttatcaagtagattttttgtcagtctggagctcataagcaccacctcgttactgttcacagcaacacgcttcacgatgccaaaaatatgcacctcctagtcaacaaatatcaatcatgtattgactcaaatgatgattctttaaattccagtcatcagtttccctgacatacgttgacttatatgacaattcttcaaattccagtcatatgctttcccgatattcgttgacttatatggcgattcttcgaattccagtcatctgctttcccggcattcgttgacttatatggcaattcttcgaattctagtcatcagtttatccggcatttgttgacttatatggcgattcttcgaattctagtacatcgtttcgtaaataactataccaatcgcgtaggatgcggattcgagtgtgctggtataaaaacgcaggcgtagcgggctacgctgaggcttttagacctgtgcaatcggattcgcagacaagtgagtggtatagttatttcgaaaacgatgtactagtcaccttctcatccagtttttattctagtttagacaataaagcgcaactttcaacggtactttcgttgtcccaacaaagttcctgtgtctctctatctccaaaatacaccggaaaacggaactttatgtgcttcaggaatctgccatctggctgctcctgctcgtaaatgtccacctgttctacaaagctgttaagaaattctttcttctccaggtcggtgaacttatcatatagtttatcaaaatataaaagaaattgatagacattttcttctgatattttctgttgccggatattcaacaggcggttcttgacttcttctatactgttctccacgccttcaatctcatcatacaaacggtataaccttgtctccatatcctgatatttcttctcataaaatttatccatgatatccaggctatccatctgctgtccaagtcttccttttgctccggtcaactgcctgtactgtttttccagtctttcaatctctttttctatttcttctgtatcaattcttgaaccgattttattcagaattgcttcttcaaatttcggattcttcaccagcttccgaataacttcttccactgcattattaatcttctcctcgctccattgtttacgatatccacatttatgaccatctaccaggcgacgatgtttgcaggcataatagaaataatccttatataaagttccgtctttctttttctttcggttcacgtttccatacataccgcttccacataacggacatctcaatattccggataaaatatgctcatgatcgaggctatgtgtcttttcatatttcacacctgttttttcccgtttttgatgagccagctcccagtctgtttctgaaataatcccttcgtggataccatcgtgcagcatataattttcctgcttttcaatgcgatattcatttcttgtaccagagactttctcgtttttccttcgtccataagccagctttccacagtataccggattatccagaacgccttttataaatgaagcggcaaatgcgtccaaagtgttattctgtcgttttttctttttatatccatgctggttcagccatgtagcaatcgcagaaattcccatattggtatgaataaatttatcatagatcagacgaataatctctgcttcgtcctctgcgatctgcaattctccatttaccaattcatagccatacggagcaaatccatcgttccattttccttccctggctttctgcttacgtccctccattgtctgaacaaggatattctctcgttcaatctctgccaccgcagacagaacagaaatcatcagctttccgctatcttttgagctgtcaattccatcttctacacagatcagattcactccaaaatcctgcatcctctgcaaagaatttaaaacatctgccgcattatgcccgaatctggaaagcttgaacaccagtacaaactgtacctcatctgttccattctcaatattatccaacattctctgaaattccggtctgccctctacgctttttccagacttaccttcatcagaatactcatttacgatttccatattctgaaattccgcatatctcttcagtttttctttctgagcatccagactgtagccatccacctgcatggttgtggatactctggtatatatatcgcatctaatctttttattcttcataatcttcctcgcaatatggctttgttttattgtcccaactatattttagtacttgttccaactattttcaatacttctttttattttttattgacatattttcgttacaaccatataataatgatagagacaggatttctgtcatcgaaaatattgttcgcccaccgttggcggcttataagtaatcggctcgaaaatattgttcgctcaccggaagcgtctaataaatgtccggctcgaaaatttcggccctgccgcatggcagggctttttttataggtgatgaacatgatatatcaagaagggtacgtttaccatattaaagatgaatattttgagaaagtacatgattccaacttaatgcagaacaaagagggcggtacataccgtcctactttttactgtctgcgtgacaataaaacttctctgttatggatggttccactcagttctcgtgtagaaaagtttaaagcaatacacgataaacaggtggctaaatacggaaagtgcctaacgattgttttaggtgaatttgatggaaaagaagctgcttttcttctccagaatatgtttccaatcagagattactatcttgaccatatacatactcgaaataataatccggttcctgttaagcattccattcacagggaagtaacaacacgtatgaaaaaaattcgtcaacttcattccagaggcaaaaaagtggtatttccagatattgaccgacttgagcaaattatgcttgcagaagtaaaagataacacaactacgctttcctgactcatctttttaaactgatactttggaatcgcatatgcaattccacttaatatcggaaccataagcaggcacggcacgattgtaagatgcagttgaaagaaaaataccgtagcaaacgtatttgataaaatcttttctgcaccaaacacaaccagtacgattgcaataacaaatgcatctcccaaatatatgaatcctctgcaatcagcatttttgatatctgctttttcgtcattcctacaacttccaaaagtgccagctcctttttcctgctaatcacagaagttgttgttgtattaaagaaattcataatacatataaaagctaaaataacaacaaggaaaccaccgatcatataatattttccgacaaaccgcctaaagctcgccttcatatccaatacagaagaaacatttatcatatcattttctttcaaaacatttttatcaatgtattcttttacctgcttatcctctcccttcttggcatcaatagcagcatacattgctgattgatttccgtctgggtgatatactcttcttctgggaccattactgcaatacaaacagtaatataacaaatagagtcattataattaaggaagaaaatgaaaatgaatcctcttcaaagagattatatgccggattgatttccattcctgtcccagctttcgtaaatcccgctgccttagatatcttttccgttttcttttccagattccaaaggttcttgtaccagacagaatactctttttctccattgtagatgccattttctaatgcctcctgcgtaacgggataacgattctcctttgcatagtcttttgatacccagaccatctgacctaaaacagctttatccccctgccagaatccacatatctgaaacgtatctgtcttatattgtttcagcatgggatttacttcccaggtcagcgttacttcttccccaatctttagtgtaacacccagagattccaatatcatactgctaagtgctacttcattttctttctctagcagtcttcctgtagttgacagacaattgaaactttctgccatattttcatctgcatatcggacctctacggaaaacccaaaccgctcatccattccagatcccaagaaaataccggaaccatatcgcttaacatcttcactctgttcgattgtttgttgcaatcgctttgcaccttcttctgacagattctgtgcactggcatgagcagaatccataaactgcttaatttccgttgctcttttggaaagaatcatagatacacttcccacaaagagacttgtgaataaaagggaagtcagcatgattgcaataacagcaataacattcctagagtgtgtctgaaaaatgcctcttcttattttaatctaacataaaatgtagatttccctctgccttccctgcgaagttctccttctgctacaagcttacgaagtgaaccttctatcgaactcacactgagtgccgggcatagttctcgaatatcttgcttattgaatttcccaatcctttgctgtgtggctttacgaaccatctcaattgccggaagtttctcttctacaatttcaaatcggtcttcaaaatctttgtaagcagcaagaattgttccaagtaaatatttgataaaaggaactgcgtcctcttctccttcatgccagccatcctgtgaatggcccaaagcctcataatacaaatccttgttctttgcaattttagcttcaagcgagatgtacttacctacataaaatccactacgataaagcagtagagttgtaagcagtctgctcattctgccgttaccatcattaaatggatggatacacaggaagtcatgtataaaaataggaatagccaataatggctccacctcataatttccaattaccctgttatactcttcacagattctatcaagagcctctggtgtttcaaatggtgccaatggtgtaaacagcacctccgtatgtccgtctggatatgtggcactaatataattctgtacattcttggttcgcccagcgagtggattattcatatggctgcacagtattttatgcaactgcaaaatatagttttgagtaataggaatcgcattaaaactctcatggataatatttaatacatcacggtatcctgcgatttcctcttcatctctattctttggtgtggtcttctcctccaccaactgcttaattcttgtattggttgttacaataccctctatcgcatttgaagcctcggtactctgaatctttgctatctccacaagtttctccaactcgtctggtctttgcttaagatatagttcctgtttccctgcgaacttgtatattgctgctatgagaccaagaatttctgaatcccacttttcttctttaatttttgaatagttaaacggtctcattatttaagcaccttcctttcatttttcccttaaagcatctagttttccttaaattatagtcaataataagggaaagtcaatatatttaaggttgttttcccttaaactcgttcgttttttgcgggataaataatattttatgcgatttacagggatatattcacatttcatttaatatttttgccgcaaacggcatgtttatgaaaaatgcgatggatatttccgctttcggatcataatctatgttcgttgcataaatttccagtgcctggcgataaaataccttctcggatgcacgaatatcacggattctctctagcaattccttaaaatatccaccgccacccaaattttttaaacgatcatcatctaaggtaaaaccttttctcatgtattcttttaaaatcccggttgcccaaattctgaactgtgttcctcggtttgattttacacgatagccaacagaaataataacatcaagattgtaatagtctacattgtaagcttttccatcagaagcagttgttgcaaattttgcaacaactgaatcccgctgtaattcaccttctgtaaatatattttttatatgtctggaaatggttgatttatctctctgaaacaattctgccatctgatcaatggacaaccgactgtatcaccatcaaaagtagtttcaactttcgtcggaccatcctctgtcgtataaataatcatgtctgctttttctttgttcataaatctattttcctccaaaatcagatacattatcaatgtgaatgattaaaaaaatagaagttcaacacgattgctatagcaaaatcatcattctgtatctttaccatttataatacggtagtaatcatccatatccacgctaagttttattgtggtatctggttttcggttgtccaaaaggcaaacagtctccacatgggacgatacgtcctgattaatgtctggttttgtgcccgttcgtggaaacatatcttgttaaaacggaaacaggtccacaccttctgaaaccgcacattcacagctgtaaacagatacaatctgtgacaaaattggcctccatatcaaagtcttggccaccctagagcgtgtctgaaaaataaaaattgcacaaaacgcatgttttatttcccttttcatgataaaataaagaaaaggggtgttcactatgttgagacgatatgagttgactgatgaagaatggcttcgcattgaacctttattacctcctgaaaatactggaaaacaaggacgtccaaggaaagacaatcgtatcattatgaatggaattgtatggcttgcacgtagtggggcaccttggcgcgatcttcctgaacgttatggttcatggaaaactgtctatagccgattccgaaaatggatcgatgatggtatccttgataatattttccgtattttaagtcttgaagcagaattggaagaattatccattgatgcttctattatccaggcgcaccagcatagtgccggtgcaaaaaaagggggccttcaaatgaaatcgggcatagccgtggaggagccagcaccaaaatccatgcggcagtagatgcctatggatatccagtttatttaatgatcagtgagggacagcgtaatgatatcaattatgcaatccctttgctcgatcaaattgaaataaacggaagcaatgtgttagctgaccgaggatatgacagtaataaattacttgattatgtgtacgcccgcggtggagagccaaccattccatcccgaaagggagctaaatttgaacgtcattgtgattggtggttatacaaagaacgccatttagtagaaaagtattttctgaaattaaaagcattccgacgaatcgctacacgttatgacaaattagctgcaacttacttgggatttatttgtatcgcctcaatattaatttggttaaaataaatgtgaacttccagtctttttccgcctaaatcgagagtcccggtagtgtaaaatagtttgtgtttttggtaaaaaataactcctttttggtaagaattcagatatgacaattcttatcgtaaaggagtattttttatggcagttgcaaaagaacaaattcgacagattatctcagaaaacaacattaatagcgttgcagatatatacacgcttctgaaagacagtttcaaggatatcctgcaggagctgatggaggcagaactggatgcaactcttggctacgagaaaaaccataagggagatctacagacagacaataaaaggaatggtcattctacaaaaaacttaaagagtcaatacggtgaatttcaaatcgacgtaccaagagaccgtaacggtgagtttgaaccaaaactcatccctaaataccagagagatatttccgggattgaggaaaaagtgatctctttatatgcccgtggtatgagtacacgtgacatccacgaccagctccatgatctttatgggattgagctatcagctgaaatggtcagcaagatcacagacaagatacttcctcaggttaaggaatggcagtcccgtcctctgaacccggtttatccgtttgtctttatggactgtattcattataaagtacgtgaggatggcaggatcctgagccgtgctgcgtatgtagttcttggcgttacagtggagggatacaaagatatcctcagcatcacagtaggcgcaaatgaaaccagcaagttctggcttgggatgcttaatgatcttaagaaccgcggagtaaaagatgtccttttcttctgcgtggatggtcttccgggttttaaagaagcgattcaggcagtttatccgcaggcagagatccagagatgtgtgatccatatgctacgcaattctttcaaatatgtaaattataatgatctgaaaaagttttcctcggatttcaaagaagtgtacaatgctccgaacgaaacagccgctttaacagagctggagaacatgaaagaaaaatgggggaagaaatatccgtacgcgatcagtaactgggaaaataattgggaagatgtaagttcctttttccagttttctaatgatatcagacgcattatgtacacgacaaatatcatagaaggattgaaccgccagtatcggaaagtcacgaaaacgaaaagcgtattcccaagcgatcctgcattggaaaagatgctgtatcttgccagcgagaacgtagtcaaaaagtggacgcagagataccggaactgggatcaggtattgaatcagctgatagtcctttacggagaacggcttactgcttatctgtaagagaaaagaaaagcaggaatggggaagctcttttaagcccctcattcctgctctctgtctattccttcggcatttatattattgccagaaatttccgatcctattccagagatcgggtgtgggcagagcccacaaaaggcaataatcatgatgccttacttgtcatgcaaaaaaatcgaaaatgatgtatataattttcctacatggcaatactgtaagtacaaagatatattcgacagccgcataatcattaattcgacagcaaaattttacatatctatttcttatcagaaagatttactttccatagacacaagaatttttacaccctcagataatatactcttacaaatctcttgttcaaaaataaactcctttcaaaaaggcgtatggaaatcaaaacttccatacgccaattttatattccgctctgtaagttgtctaaaagttgactaaaattatattaccattcattatcatctttgatcaaataaaacaactccttatatccagactgtataagtaattgtttaaatcctgaaagtacttcttcttttgtataattattgttctccaagaattcattatccttctcactaaggtattggtaaaaaagagcagctgccattacctcctctttatttgtataatcaatgttatctaaaagtatgttttctgcttcattaatttgtcctaaatcaatcatatccaaaaaacttttcagtttttttcctgatacttcatatttattttctttttcaagctcaacagaaacatattttttcccaaatactaaagaaaataatacccttaccatttcttttatcattcgcataatgtaatctttctcatctgtgaagtacattttcatcaccccaaacatcaatttctgtaaatggactttatcatcaaataaatcccacctatattccaactgctataagtaatatacccaacattcttcctagaagttttgacttccgatatcctaaaagagcatttgtttcaggagtagcaaatggtagtaaaacgatatctatgcccattgtcgtaattccaattcctattatgaaaacgttattgttagaaataatgccataaaacataacccaaaagccccccaataatactaaggtaaaatacttaattttatggctgtctttatacaccatcttttcataacaattttcacattcactgttacaaaattcagaatagtcatttagctctttgccacagtatttgcattttttcatactgttccctcggtaatctcaaaaatctcattcaacaattatcccgatttgagtaaaagcccaagggactttaatgtcccttatgattttctcttttctttcgttgtttcagttcaaacattcgccgttcttccgcctcttttttcttgcggtctttctctttgcgttcctgcttgttctgttcctgttgtagtttcagcgcctgttgcgattttgtaccaatacctatttctagcgtctgcttttttgcttctcgctgcatccgtttcggatttcttttgatatcctttacaactgtttcaacaaccggactgaatttcaaactgaagtaccacttttgaatatattcctgcacttcacaatctttcggctctgcaccaaatgttacctttgccacagatagtttaccattttcgatgtgttcaaagattcccacccaaaacggctcttcaaaaaatactgtcagctttccatttactttgtccataagaatccctcctaaaattgattgaacaaagaatggacaacccggaggggcaggttacttaccctatttatataggacggccgggctacctaccggctctggcacatcaaagatgtacgttgcgtttttatctttgcttttataatcaaaccatatggcacgattaacgtaattctgtaacttcagttcaaatcataccacatgattaatgtattttctatatactttctttataatcagcaaaaagctcccgaaggagctttccacactttaaatatacactaattcttttaaaacaatctcttctgctgcatgccatatttcccgtgaagaatgttgtaaattagtactatccataacggtaatcgaaaatttaattattcgtattttttcccgataatgtaaatcgaaactaccataccacctaatatcataattaagaaaatgttatttaaaatatcccataaagctatattgaaacaattgattattataatacctgcaagaggatatagaacaaccgttgcaagtgtccatatttttaaagttgtgcagatgtacatccaatttccattgttaaaagatagaccaactagatgtattctaaaaattccttgtgaaacataatttatcttgttgtcatcataatatgttggtaatatgtcttttgcaaagaaacaaaaccatgcaccaaataaaagcattaccccagtaaccagcaatatatcccctttcatctcagctaatgaacttccagatacaactaacataataatttctgtaatagatataaaaaaacataacaaatatgctaatatccagttttttctatgctggtgaatagaatccctaacagccatatcgagagatcctactaccaattcctcgatttcttttttatcaatatttttctgtgtatctattttttctccacgtaacaattctgtaacggtgacctctaatatatcagctattggtatgagtaatacgacattgggcatactaagaccacgttcccatttgctaactgttttatctgatacatataatttttcagccaaatccttttgagttaaattcttttcctttcttaattcggttacaaataaaccgaatttttcattactaatctgatacatatatccacctcctgcacacatattataatgagagtgtgcataaatcaatcgactagcagtagaattacagaatattagcacaaaattcatcaaataatctccccatcatgattatttctataaagttatattcggatattttttaagccatactatggaataattaaatcggcaacttatgaccaagacggaaaaaaacagccttcagaaacttagaaaagatcacttgctatagaattgtaatatgcttcttctttgaccccttataaatacaaaagctgaacaaataggatttttcgtcctacctgttcagctctttgtttacctgtaaatcaattctttcaacacaatctcctctgctacatttcggatattatttacagccctgacccattccatctgatcacgaactttcatttcttccgtaatgccttgcttttccaacatctgacgtaccaaaatattcattctctcctgtgcttcatcgtccacaagattcagatgttccaccagtctgtcttccaacatatacagtgaatacattgccggacgatgctctttcagatatactttccgcatcattccatattttccataatgcggttcttcatctgtgctgacaagattcggataataaattccgtctgtgccaagtgtgtaggttccacccattttttcaaatgtgcttttcatgtgttattcctccttgaaatcagcgatgttcttagatcatcgcaaaatatttcagggcagccttgatagcatcttctttctctttcgggcattgtggaactcttgtattttctgattttggaagattatagttttcccccacttcaattccacatttgcgttttacctgagaaatatataaattcgaaaccttcaggtcaaattctttcagcacataatctttgatttcctgataggttgctttcaactcggcactggtggcatccaactcatccaggtctaagtcgatctctatcgtgtcatctggcttctgttgggacaaaagaacaaccgtctccacatgaacagtcatcccaaattgatcaaccgggcatacttttctaagctcatatcctctctcacacagatacttcagatcccttgccaacgtcgcactgtcgcaacttacatacacaatcctctccgggttcatctcgaccatggtctccagcagagtttcatcacagccttttcttggcgggtctacaacgataacatctgcataaacaccatttttcttatactctcttggcagcacttcttctgccttacccacaaagaactctgtattctccaggccattaagtttcgcattttctttcgcattctctatagctgccggaacaatttccacaccgcggacaaattttgctttctgtgtcaggaacagggaaatggttccgatcccacagtagagatcccatactgtttcctgaccgtgaagatctgcgtattccagtgcctttgcataaagcttctgggtctgcataggatttacctgatagaaagacagaggagaaatctgataggaaatatctccgatcctgtctgtgatatattcctgaccccagagcagacggatttcctcaccaaggattacattgctgtgtttcttatttacattgatggtgatacttgtcattcccggaatctcacacagagattttacaagctgctcctctttcgggagcttgtttccgttcagaatcagacagaccatcacttcttttgtgaagtatccgtaacggatcaggacatggcgcaccagccctttgcctgttgcttcattatatggttcaatcccgtatttctccatatgtgcgatcacacggtccagaacttctttattctcagctacaccaagtgcacagtcacggttttcgataatattgtgggttcttcccgcatagaaacctgtaacgatttttccctctttatttctgcctacaggaaactgtgccttatttctgtaatgaaaaagttcatccatgccaatgatcggctccatggggatatctgtaaagccaccgatacgttccagatgtcccttcaccttatttgtcttaaatacaagctgttggtcataggaaagtgcctgaagctggcatccgccacactgacgggcaaattcgcacttgggctcaactctgtacggagatggcttcagcacctccataagacggccgtaaccataatttttctttgccttgataattttggctgttactgtatctccgatcactgcgtccttgacaaaaacggtgaagccatcggcttttccgataccttcaccgtcaattccgcaatcttctatctctaacgtaacaagatcgttcttacgaaattccataaagattacacctcatctgttcttcttaagttggattcaaacaatttattatatccaagccactcttttttactcttgtttgctgcaaaaatctctgtgatggtttccattcttgcatctgtattatctgcaagattgagggctacggcctccaccagtgcaggttttttcggggaaccatattcaagctctccgtgatgtgacagaatacagtggatcagttcattcttaagcacctccggaaattccggtatctggtgtgcaagatcattgatcatctgtgctcccatataaatatgtcccagaagctggccttcatctgtataatcatttaacggaaatgcagataattcttttgtctttccgatatcatgaagaagtgatgctgtgatcagtaaatccctgttgatgaccgggtatgcctttgacatataatcgcagagtctggtcactcccagagtatgttccatcagaccgccgataaatccgtgatgtactgtcttcgcagcagaatgtccttcaaacgctttcacaaaagcttcatcttccacaaataatttcttcagaagtgcagacagataagtattctccacactgtcaataaatgctctcagctggctgtacatatcatctgtgctgttctcacttacaggaagataatctgcaggatcatactcatcttcagcagccttgcgcacacgcttgatattcagctgcatagcccctgcaaagctggtcacatctcccacaacatctatataatccagtgcatcaaaatcatcaattccaagagaattcggatcccagatcttgccatccatgattccggttttatcctggaggataatattctcatagggttttccattcttcgttaccgcagactgtttctgcttgcacagataaatcccattaattctgtctccctcatgtaactcatttaaaaaacgcataaagcctgcctctctatcctttatttttagtattataacaattccacaagaaagaatcccgcttgtaggattctctgcctgtcactatctctctccaactgttatcttataatctttctccgcatactcaccatcggaatttttgcgaagaaccgttatggtaagattttctccctgcttttttgtctgaagatatgtatagtaagactgcatactctctgtgggagttccatcaatcttacttatgatatctccacactgtatccctgccttcatcgcaggagattcttcttgtgtacgctccacgtaaagtccctgatcaattcccagttttctacattgtgcctgagttatctctgttccataaatacctgtatatctgattgtctctttgttagccagatgttctaccaacggaagaatctgcgaaatggaaactgcatgaatattatctccatcgttttcattcttcttcagtatcatacctgccacatttccgtcagaatcaagcagcacaccacttccatcttcattcccctgcacatctgtagccaacacattatactccgtatccgctaccgatagtttttcagaaacagaagtgatcattccataaaccaccgcatcactgtcaccggcaggacttccgatagcaattactatatcgctctgtcccagtttctttgtgtctgtcagatcagataccacgataccttctcttgtactgtcattgagaagattttttctcacagttgcaactgcaaatccggaatctgcatctcccctgcatatctctccctgcactgtcgaaccatctgcaaaagtcacctgcagttcctgcagattttccagttcttcctcataggtcaggatataaaattgcgtctctgtttcaagaaagacaagaccttccgtatcttcctgctgaaaataagaattattcagcaaatcctcatcctttgaaattcctctcacgtttacaagagattttcgggatttttgggaaaccttcagcacttccctatacatctcctgacgcattgccagaagactcttctcctctttttcagaaactgaagcgacagattccctctctgttgcctgttcttcagatatcgtctccgctacatccgatcctgtcagttcgattttctgctgtgtattctcttctctatccgccataaccggaaacacactggcaaaggttacggctgcgcaacctccaaacaaaacgccacatcctgctatcataagcagcctgcgcaacagactgccattctcttttggctgtttttttaccgtttcttttataaactgatattcctgtgtgtccattttgttttttttcatacctgattctcctgccgcactccattcaggataactgcccagtgtcatacaaaacagcaatctgccaaacagttaccattcaggttcaatatcgcttgtattcaaacaaattatatcgtaacaatctacacattattttaacaaaaagatatgaattttttatgaatatactataagtaatttcccacagtacaaaaaagaagctcctactgaaacacttatcgtatcagcgaaacactgcaactcaggttattatgatgacacaaaaaaacggcttaaatgcacatataatagcattcaaaccgtttcttatgcggaagatgggacttgaacccacacgagcgcaatgctcacaagatccttagtcttgctcgtctgccagttccgacacttccgcatatcgcatttctgttataagttttacttattgttgcgacaattggtactataccaaaaactatataaactgtcaatagcttttttgaattttttttatttttttgtaaaaactatcatttttatgtatttctatcctttttgctttccatagattccaaaatcatatataataggaaaagtatttgtaactgcttatttcacagtaagttactgttcactccgttcacagtaacttagccaaaattcattccagattgcctgcggcaatggaattttggcttgtatgtctcgggattttggcatattcatgccaaaacacctcgcgggatagtgatgtgtgaacagtaaccaccgttacacagttacaattattttttagaattgctataatcccggagtacatttccataacagaaaatgctataatatcagggacagcaaattataaagatatctatcaggagatttaaacagacaatgaatcagaaagcatataaagcacttgaatattataaaatcatcaatatgctgacagacaaggcttcctcttccatgggaaaagaaatctgccggaagctggagccatccacagatattgatgaaatccgacatatgcagactcagaccagagatgcacttacccgtcttttccagaaaggaaatatttcctttggcagcgtcaaagatgtgcgtggttctctgaaacgtctggaaatcggaagttctctggggattggtgaacttcttgccatctgcagccttcttgagaacaccaatcgtgtcaaagcttattccagaagtgagcgcggtgattctctcccggactctctggacgggatgttcgaggcactggaaccactgactcctcttacaacagagatccgcagatgcatcctctcagaagatgagatcagtgatgatgcaagcagcaacctccgccagattcgaagaaacatgaagattaccggagacaggatccatacacagctctcctctcttgtaaacggaagtgcccgcaattatctgcaggattccgttattaccatgagaaacggacgctactgcattccggtcaaggcagaatacaaaggacaggttccgggtatggtacacgatcagtcctccacaggttctactttatttatcgaacctatggcaatcgtaaaactaaataatgacatccgcgagctggaactggaagaacaaaaagagattgaagtgatcctttccactctgagccagcaaactgcagaacagaccgactctatccgcgcagatcttaatatcatggtacagcttgacgttatttttgccagagcatcccttgccatggatatgaatgcaacagaaccaatcttcaatgatgaaggacgcatccgtctgaaacaggcacgccaccctctcattgataagaagaaagctgttcccattgatatccgtctcggcgatgatttcgacttgcttgttatcaccggtccgaacaccggtggtaaaactgtatctttaaagactgtcggacttctcactctcatgggccagtccggtcttcatattcccacactggaccgctcagagcttgcactgtttgaagaagtttatgctgatatcggtgatgaacagagtattgaacagtcattaagtacattctcctcacatatgaccaacgtggtttctttcctgaaaaaggccaaccgtcactctcttgtccttttcgatgagcttggtgcaggtacagatccgacagagggtgctgcccttgccattgcgatcctttcccatcttcatgaacagggaatccgcactatggcaaccacccattacagtgagctgaaggtatatgcactctccacctcaggtgtagaaaatgcctgctgcgaatttgacgtggaaacgctccgcccgacctaccgcctgctgatcggtgttcccgggaaaagtaatgcattcgccatttcttccaagcttggacttccggactatatcatcgataaggccaaagaacagatcagtgaacaggatgaatctttcgaagatgttctcagttccctggaaagcagccgtataactattgaaaatgaacgccgcgagattgaacagtataaacaggaaattgcctctctgaaatccgaaatggaatccaagcaggagaagttgaacgagcagcgagaccgcatcatccgtcaggccaatgaggaagctcatgcagttctccgcgaagccaaggaatatgcagaccagactatgaagatgttccacaaattccagaaagaccatgtggatctctctgctgtggaaaaagaacgccagaatctgcgcaaacatatgaataaagcagagaaaggcatgactcagaaaactgctgcaaagaaaccgaagaaggaactcacagccaaagatatctccctcggagatgcagttaaggttctcagcatgaatctgaaaggtactgtcagcagccgtccggacaacaaaggtttcctcttcgttcagatgggtatcatccgttccaaggttcacatctctgatctggaactgatcgatgaagcagagatcaccacaccaaccatgcagcgtacaggtgcaggtaaaatccgcatgtcaaaagcagcccatgtatccacagagatcaacctgcttggcaaaacggtagatgaagcaattgcagagcttgacaaatatctggatgatgcttatatcgctcatctgaaatctgtccgtattgttcatggtaaaggaaccggtgctctaagaaaaggtgtacacaattatctgaagcgccagaagcatgtggaatccttccgccttggagaatttggcgaaggagatgcaggtgttactattgtagaatttaagaaataggagggaccgccatggtttccaaacagaaaatccttattgttgatgatgataacaatatcgcagagcttattgccctgtatcttaccaaagaatgcttcgagacaaaaatcgtaaatgacggagaagaagcgttaagggaatttgcctccttccgcccggatctgatcattctggatctgatgcttcccggaattgacggttatcaggtatgtcgtgaaatccgacatacctctgatgttcccatcattatgctttccgcaaaaggcgaaacctttgacaaggttctcggacttgaactgggtgcagatgactatatgatcaaaccctttgattccaaggaactggttgcccgtgtacgtgctgtcctgcgccgtttccaggttaagcagccatcgccttcttccagtgaaaaatgtgttacttacccggatctgaccgttaatctgacaaactattcagtcacatacatgggtcgtcaggttgatatgccgccaaaggaactggaacttctctatttccttgcagcatcaccaaaccaggtatttacccgcgagcagcttctggatcatatctggggttacgaatacatcggtgatacccgtactgtagacgttcatatcaaacgtcttcgtgaaaagatcaaagacaatcctcactggtccattgccaccgtatggggaatcggatacaaatttgaggtaaaaaatccatgaaacagcatcatctttccacaaaattcctgagattttatattctcatcgggattttaggatttttcctcataaccctcggcggttcttatatggtggaaaagcatctggaacactctttaagtgccgcactttatacagaagcgcacaatatcgcatctaacgaagcagttaaaagcaatatctcttccagtacagtagatactcttcaggaacacttatgtgcaatttccgattttcaggatgctgtattgtggatcatcaacagtaacggtgaaatcattgtaagtacacagaaaaatattgatgtccgggatccaatcccactggaagaattcgatgcttccaaatggggaagcaactattatcagattggaaagttttatggtttctttaaaacagatcatttgagtgttattgccccgatcacctctgatatggaaaccaaaggttacgtggcaatccattattcgatgacaaacctttatcagagccgaagcagtattctttttatcatgcaggtaatctttctcctgtgctatgcagccaccagtcttctgctctgggcttacagccactacatacgtaagcccctggccaggatcatgaaaggtgccagtgaatatgcaggaggtaatcttgcatataaaatagacgttacttctgatgatgaaatgggatatcttgccaaaactctgaattatatgtccgatgaactgaacaaaaacggagaatatcagcgtaaattcattgcaaatgtctctcatgatttccgttctccccttacctccatcaagggatatgtcaatgccatactggacggtaccatcccctatgagatgcaggaacggtatctgaagatcatcgcttttgaatctgaacgtcttgaaaaactcacccgcagtcttctgactctgaatgaactggatatgaaaaaacggatgatgcacattcagcgttttgatatcaatgataccatcaaaaacacagcagctacatttgaaggcatctgcaccagccgccagatccgtctggagctgcttctctccggacatgaactttatgtcagagctgatatggaacagattcagcaggtcctttacaaccttcttgataatgccattaaattcagcaatgataattcctctgttcaaattgaaacaactgtaaaaagcggtaaggtcttcgtttctgtaaaagattacggaaccggcattcccaaagaaagcctgggcaaaatctgggatcgtttctacaaaattgatgcatcccgcggaaaagaccgtaaaggcaccggacttggactttctatagtcaaagagatcatcaatgcacataaccaaaatattgatgtgatcagtacagaaggtgtgggaaccgaatttatctttactctggagaaaacgaaataaatttctttcacttgaaaaatattgtcttaaatatacctgtaacaaccctcttacctggagcgtgtctgagaggactgctataaaaaataccgtaacaaaagtatatatcatttacttttattacggtattttttttattctatggcaatcctcgtaaataatgcatttaagacatttcacccaccttaactaaacggtgttctcagcattctgtcttcatttacgagatagattcctctcggtgtgatcctgatttcaggaatcacaggaagtgccataaatgacagggtaataaacggatcaaatccttctttcactcccatctcatgggccttcggaatcatttttgcaagtgcttcgtttacactctcgtagccggcatcgctcatcagtcccatgacaggaagtggtaaggttccataaatctctccattgcataccagagtataaccaccttgcgtccgcatcatttcttttacagcaacagccatatcacgatcattatctcctactacaataatattgtgggaatcatgagaaacactggaagcaatggctccgccgcggattccatagccttttataatgcccactcccatcttgcccgtattcttatgacgctcgatcactgcaatcttctgatattccccgtccggagcaaaatatttctcaccatccgattctatccatggaacctcttccagaacatcccttgtcacaatctgtttttcaagcatctgaatcactcttgcctttgttcccggatgtttcagtttcagacgttcctcactgaaacctgatacatgaactgtatttttcagatatggaggacatggtttcaattctgctttctcatctttaatgatcttcttaccacaatgatatacatctacaacattcagatctgccacattatccagaatgacaaaatctgcctgtcttccgggtgcgatcattccaagtctgtataaaccatagcatcttgcaggctggatcgttgccatctgcagtgctttctcaaccggaagtccaagctgtacagcccgcttcacattataattgatatgcccctctttacgaatttcttcgatatgcttatcatcagtacagaagcagaaacctgacgtatctgtatggtgttccacaatccccttcacaatagcatccagatttcttgctgcacttccctcacgtatcaatacctgcattccatttcttgcctcagccattgcatactcataatccacacactcatgatctgtgtcaattccgccaagtacatatgcagccagatccccagatgccagaaacggtgcatggccatccttcactctgtcctgaaacagctggagcttttcatgcatggcaacacttccgttaatcacagaaggcgcatccatcacttcaccaagtcccagaatcctcggatgttccagatagcccttcatctttcctgctgtaagaatacacccgttatcatccacatgagtcgccggaacacaggaaggcatcatcacatatacattcgccggtgcatcttctgtctgatccaggatataatcaattccatccgtaccggatacatttgcagactcatgaggatctacaataaatgttgtagttccacactgtgcagcctgccggaccagctcacccggcgtcaccagagtagattccagatgcagatgactgtcgataaatcccggacagattacttttccttccagatcaatctctgtctctccttcatatgtaccgactccgatcacaattccatctgcaacagccacatcaccatcaataaattctcccgtaccagagctgaacacacgcccatttttaaacaccaactcagccttctcaatacctcttgccatctgcgaatacctgcgatacatctcaagttccataaaaaaacctcctttcgctcccttgaaagccctcctgcgccacacattcattattacagtaaagcttccaatatattatcatatttacttgttttttcagactttttattgtcccaatcatttttttctatatatttcattatatattatcatctgtctttttaatttgcaacctgttttttctttaccaaagcaactttccatcaacttttaacggctttacaaaaaggctgccggatatctcctgcagccttttcatatcacttacatctctatatttacatcatataatctttgatcacatcatgatctctgagtactttctcgatcacagttcccttaacagctttcagaagcggtttcttcagcatatccagtggtcccggaagttcgatctccagtggagattttccatccatcagcttcacactgctatccagtaattctctgatatcataaacactgccccatacttccggcacacctctgtcaacacccagaagtccatacacagcctccatagcagttcttacggaatattcagtagtaaatacagtatctcttggtgtatcggcaaactgtccgaggaatgcgaagtttacacagccatccggaataacatcaggtctgtcaccctttgttctcggcataaagaatgctgtaatataaggcatcatggtcggtacacaaactgcactgttctcagccatgtcttcaatctggtcaaccggaacgccaagatgatagagccactcttctgtgatttccttacctgtacactccttcataggcttcttgatataatcaccaggtacatctgtaaacagaccatatacccatacacaaaccttgtctttgtcctgatccttgaactgtccctgtctattgatcgtccagcttaataaccagctggaatcctgacagcttacaataccgcctgtaacaaccttgcctgttctcggatcacgtttgcagatatctgtaatataaggaatgatcttatcatccagagtagtcactgttgctgactcccaatttgtcttagcaatatcagaacagaatttctcaggatgtccgaaggacggatcctgttttgcgatatttttccagagactccagcatccacttgtacgaacttctgcatctccgttcggtgcatgattctgatcgccatagatggttccctctgtacagcttccgtttgtcacaaatacaaagtcgttttctgtaagaacaattcccttttctacgccattcaccttacactcgattgcttttgcaatcttcttattgccttcaaactcaaaaagtacgtttgtaacctctgtattgaactggaattcaacacctgcttcttccagatatttctgcattggcaggatcagggattcgtactgattatattttgtgaatttcagggcactgaaatccggaagtccggaaatgtgatggataaatctctggaagtacagtttcatttccagtgcactgtgccagttctcaaatgcgaacatggttctccagtataaccagaatgtggaatcaaatacttcatcgtcaaatacatcttcaattgtcttgtcataaagatcttcatcctttgtcatgaacagcttcatgatctccatgcagcccttctggctcagattgaatttaccgtctgtatgagcatccttgcctctctcttttgttgcacgacagagagaatagttggggtcttccttattcagccagtaatattcatcaagtacagatataccaggtgtttcaatggatggaatacttctgaaaagatcccataagcactcgaaatggttttccatctcacgtcccccacgcatcacatatccgcggctcggatcaaagataccgtcacatgctccgcctgcaatatccattgcttccagaatgtggatattctttccgggcatctgtccgtcacgtacaaggaaacaggctgctgcaagagaagccagtccgcttcctacgatataagcatgtttatcatctacgccttccggctttcttggacgtgcaaatgcttcatagttaccgtttgtataataaattcccttactgtttttctcatattttccacgttctgtattgcgatattcacttgtattatgaagtgcgtcataatcttcttttttctttgtctcagctgttttatacttctttcctactgccactgctgccacgcctgctccaactgccaatgcggatataagtcctaaacctttatttttactcataatacacatccacctttcttgaattcttctttagaagttctttcagattcgttatcttaaatgctttttactctctgctttacccatttcccggaaactcttttcgcctgccggaaatctcttgatctcccggcaagacatcttcatgacttttacattcttatctgtatgtttcccacatcataagcatttcatccgtctgaattatctgtttgttgctatggctgtatattaacagttaaaatatgattctacaatttacaaaagccgccgaatgataagttttttatcaccctgcggcttttgtaaagaatttttatatgattatttttccatattatttttctgaaagttatgaatagatgtagtcactgtatcgcgaagtgtcaaatccatcattcttaccagatcttcaatattttctttcatcccttccctgatccactcaagtatgattcccacaaaaccatatttatagaagtctgcaataaattttttatcctcttctgtgatattcagacccttgcttttttcttccaccacacccacgatcagatcataggttaatttaaaaagataattttctatccgctccctgtccacatttctgtaaacattcataataaacggtttgttttccagcactgcctcaaatatctgggtcagcccttctgtccaggattcagaagtctttttgccctgaagggcttttgtcccatcttccacgcaggaccattcaaccagatcataaatatccttgaaatgatagtagaaagccatgcggcttatcccgcagtccgtggtaatatctgttatcgtgatcttgtccagaggtttcttcagaagaagccgtttcagggattcttccagagctgcttttgtggtatttggcatataactcctcctgtctgcttactgtgattatttccagtcgtagtttctcaggtgtccttccagattcatgtggtcaaaattattctggcgcagtgcttcgtacagaacgattgctacggaattgctcagattcagagaacggatatctccgatcatagggattcttacgcaggtttcctgattattgaccagaatatcctccgggatccctgcactctcttttccaaacatgatgtagcagtcttcttcataatgaacgtctgtataagtctgaggcgcttttgttgttgcatagtaaatttttgccccgggattcttctccagaaagtcctcaaagtccagatatgtagttacatccagatctttccagtaatccattcctgctctctttaaggctttctcacttaaggaaaatcccagaggctcgataagatggagtctggttcctgttgccacacaggtacggccgatatttcctgtgtttgcaggaatctccggctcgtgaagtacaatatttaattttgccattttctttttattcctcttgttattaatcgtctgtctcttcttagaaaattgtctcttaagtttcctgcagttactctttgagaagttgctgcagttcatcctctgccggacgttccagatagcgggcactgccgccactgtagagaagccggtcattaccgctgtttgtctgtccgatgatctctgccataaatccttcattgcgaagcctctgtaccagtgcttcacctccgcggattccaatcaatactgctccatctgcctgaagcttatatggattcaggtcaaaaatctcgcacacttctatggtctcctgacgaatcggtaccttacggaagtctgcttccagtcctacttctgaagcttctgccatcttccagagcgcacttaaaaagccgccctcacccatagcatataatgcgctggcatctgcctcctgcgcaattttccagacaatactgccggctccataagcatcccaaagtgaaacgcaattctgaataaaaccggcagagaatcgctctgccagtttgtcctttttattttttgctattacagaggttcctttcaaagccaccgggcatgccactaccagttcatctcccggtttcaggcatccggttatttctgccctcagagcctccattgccgcctgtcccagtctcattcttttcctccgaaaatttattatacgatcagagacagaactgtcggcactaccattgccagtaccagaatgattgcaataattgctgtgatcactttacggttctttggattaaacattcccatttctcttcacctctttaatctctgttcaggttctcaaacacatctttcgtcacatctgtcacatgagcattgttagtcagcggatcacggtctgcatagttaaacaacagcactgttccatctgcaaatacttccacatgtgcattctttgccactttttcccgttttctgaagtcccatacctgtctctcaaaaggcttctgatctctggcaaagccaggacggcttttcaggttttctctcagatagagatcatataccatctggtcttttacctgatccatggaaatctccggcacatcctcaagaaattccagcaggatctcatatcttcgcattcttgtatgagaaacatcaccatagcccttttccatgtaaaagctgcccagtctctcataaatcgagaaagcatcctggaaaaagttttccagatattcaagtgtattctggaattgtccactattataatacacttccaccatattttccacagttttcagcttcaaaacatggtcataatccagccacttcgtggaaagtacctcataaggctcctgtgttttgtatacaataccatattccctgcacatctccatcatatgggaaccctttaacaccttcaaaaagcccagctgaagctgctgtggtttcaacgcatagacatcattaaaggaatgccggaagctgtcgtaatcttcatagggaagtcctgcgatcaggtccagatgctgatggatatttccaaagctgtggattctgtcaacaattcctttcagtttttcaaaatccatagttctgtgaattgccttaatcgtatccggatttgttgactgtactccgatctccaactgaatcaggcccggacgcatagtggacatttcctgcagttcctcttctcttaacagatctgctgaaatctcaaaatggaagtttgtcacaccattatcgtgttcattaatatacttccagattgccattgcatggtcatgtttacagttaaaggtacggtctacaaactttacctgcggaaccttattgtctataaaaaactgcagctctttctttactgtctctgtatctctgaaacgcagtttcttatcaatggaagaaagacagtaactgcaggagaacggacatcctctgctgctttcataataaatgatcctgttcttaaactcggacaaatctttgtaaataaatggaatactgcttaagtccatgatctggcgccatccattatgtatgatctgatctccgtctctgtaacagattcctgtcatatctttcagatcctgcggattttttttcacataatatccggcaagttctttaaatgtttcttcaccttccccgaccataacacctttaaattctgagttttctgtcaggaatttctccgcatcataagaaacttccggaccgccggcccagaagtcggcgcccggaagaatctttatcagatctgccatcagttcttttacaaaagaaaggttccagatataacaggacacgcataccacatcaggatgctccaggtaaatatcacgcatgatatcatctttctgctggttgatggtatattcctttaatacaatatgatctgcgtaatcggatgcatatgcctgcagatcataaacagcaagattagaatgaatatattttgcattgcatgccactaataaaatcttcataaatctttagccttccagtgcactcttcagctcttctttggaagtaagacctacgaagcgtttcacttccgcaccgtctttaaacaggatcagtgtcggaatgctgactacacgaaactgctgtgcaagtgccatattctgatctacgtctacttttcccactgcgtatccctcttctgccagttcttctacaaccggaccctgacgcatacatggtccacaccatgttgcccagaaatctataagaaccggtttctcagattttaatacttctgtttcaaaatttgctgttgtaatctcttttgccatgatttatatctcctttgcttattctttataaaaatttgcaatgtaagttctctggttttataatatcaacactataaccctgttaaattttcaatttttattttagattttttattttaaagatcttacatacttccctgcattaatacctgcctgtgctccctcatacacagctttcgccacctgaagaagtccacctgtacagtcacctgccgcatagagtcccgggatggttgtttccatattttcgttaactttaatgtttcctttttcagtaagttcagctcccatctggcgggcaatctcagtactgcctgcagttcccattgcaataaatacaccctctgcaggacagaaatcatttgcctgctgacctgcttctgcctttatttcctctgcctgcacatcaggttcaagacggattccggataccagatcatcgccctctacagactggatcttcattgtgtttacactgatattttcttcaggtgtaaatttcggttcttcaccgtttgtataaatggttactgtagaagcagtatttgacaattcctttgcttcatgcatggcgaaatcaccgtttcccagaactgctacatccttgcctctgtaaaagaaagcatcgcagattgcacagtagctgacaccttttccctcaaattctttaacacccgggatcttcggtgcagcgcgcttacttcctgttgcaagaatcagactctgagtctcgaattcaccttctgtagtttttaccacaaaagtatcaaacccgccgactcccagaacctgtgcatccaatattcgtacgcccagtgctttcgcctgagcgattcctgtatcatataattcctgaccggacagcggatgttccagtccgtaatagttttctattttctctgctttttccaaagcaccgatcccattattgatcaccaggggatccagatttccacgaactgcataaagcgcagcggaaattcctgcaggtccggcacctatgattatcactttttccaaattctgtcacctgctctctgttattgttttcaatatactgtgatatatcatcgttactgttcactctgttctcagtaacttattatcagctattgttactatactacgttttctgaaaaaaatccatgattttatttggataattttggtataatttggttaaataagtttctcgattcagcgacataataaataaaagcgaagtgctgttcactcatgaaccatgcatttcgcttttatacattattttgtatgatttatttatccaaccagaggatatttgtctgtaagttctttgacgattgcctttgccttttcctggctgccttcttcttttaaggtcatagcaattgcttctgcaatcttatccatatcttccggtttcatgcctcgtgaagtaactgctgctgttccgagacgtacaccgcttgtaacaaatggagactggggatcatttggaattgcattcttattgcaggtaatgtttacttcatcaagaagattctccatctgcttgcctgtaacgcccagacttctgaggtctacaagcatcagatgattgtctgtgccaccggaaacgatatcaattcctcgtttctggagtcctttgcaaagtgcctgcgcattctcaacgatcatcttcgcatagtccttaaattccggctgaagcgcttctttgaaacatactgccttggcagcgatcacgtgcatcagaggaccaccctggattcccggaaatactgctttattaaagttaaatttctttgcattctctgcgctgcttaagatcaggccgcctcttggtccacgcagagttttgtgtgtggttgtagtcacaacgtctgcataaggaatcgggcttggatgctgtccacctgctaccagaccggcgatatgcgccatatccaccatcagataagccccaacttcatctgcgatctcacggaatttcttaaaatcaataactctggcataggcacttgcacctgctacgatcagctttggtttattctcaatggcgattcttctgacttcttcataatcgatcacgccgtcatcatttactccataatataccggcttgaagtaggttccggacatatttgcaggacttccatgtgtcagatgtccaccatgatccagattcatacccattacagtatctcccgtctgcaacattgcaaaaaagactgccatatttgcctgtgctccggagtgtggctgtacatttgcatattcacatccgaataattctttcgcacgttcgattgcaagagcttccacctcatccacgcaggaacatccgccgtaaaatctcttccccggatatccttccgcatatttattagtaagagggcttcccattgctgccataactgctttacttacccagttctctgaagcgatcagctcaatatgggaattctggcgtgcaagctccgcctcgatcagatctgcgatatccttgtctgtctttgctacgtcgtcgattgaatacatcttcgtgctcctcctttgttatacgctcagtaattattccgattataaccaattctatccatcatgtcaatcaccaaaagacatttgtccgtgtaccaaaatattttatgatataaattaggataccacatattatgtttctctgctgagctctgtagcaaataacagattcgattcgattaaaacgcttttttaatctgttttaccagtgcatccacatcttccgctttcacaagaaatctctcggttccattgatttccagactatcataagtatcatcatatgcaaaatatttcagagttacttccggagcttcttctgtgtttctgtggaatgttacagtcagcacttcttccttatctgctgcatcttttgtttcttcaacttccgaatcaagcattatactttgaagcgcctgatacaattcagtaaatttctccttctttacagttttctttccgaatttataatcgctgccatccagcttcatggtataggttttctttccaatgcttatatccacactgtcaagtgtatcaatatttaccaatgccggaatcttcaggatcaaattaaacggtttcagctccagaagactgttcaccgactcttttgaaagcagataaacagcctcttcgtatccttttacgcatgcataatagtcaccattctcatctgtatttccaataaggatcgttgctgttgcatctgcatcctgcgtttcttttgctgtgtcatcgttaactgtatttacaaaatctactgtaaaatatgtctttgtattatccagtccggtatctgtatttgctgcatcgacgccgttgctgagatcaaaagcagccagcactccaaacatttcatacatattctctgtgtttactgttgcaatctcatcatacggattggtaatttcccagtagtcgaaatccatcttataatctgccggttcctgtttgatctgaaatacttcttcgccgtcctttacaatggaaaatctgcgaatggaatagacagacattcttggatgttctacagtttttaaatctgtattttctgttttatcatctgtctgatcagcaatttcttcttccacagctgcatcttctgcttttggctcttctgcagtctcagagttttgttctgcttcatctgcccatacaggacaggatataactgctgtgcctgctgcaccggcagtaaacatggctgtcattccaagaagtaatatttttttaattttgtttttcatgtctgtgttcctcctgtccatatataatatggtttttattttatgttacttttcgcaattgaaacagaatacttactccgttcggttaaagtgcaatttctacctcagcaggcttatgtcctgtcagttctgcacttcttgtatccggctgggatactcctgcaaataaacggaaatgttttcctgcgatgtaacgatttccatcttcatcaactatattcattgctttattagaaattgtaaattctacagatttctcttctcccgctttcagagatactctcttaaatccgcagagactgtagttacgaactgcaagcagagaatcaaggtctttgatatacacctgaacaacttcatctgtatctactgttccattgttcttaacagttgcttttaacacgatatcggactctgctgatacttcaccgacaacctctgcttctgttacgcaggtatcactgtatgtaagtccgtatccaaatggataaagtgcctctttttccatataacggtaagttctgtttttcatagagtaatctgtgaattccggcattccttccaggtctttatagaaggttatcggaagttttcctgatggagattcttttccgaagagaagatctgctattgcacgtccgcctcttgctcccggataccatgcaagaaggattccattacagttatcctgcgcataattcaggtcaatcgcacttcctgccatcagaactacgatggtaggttttcctactgctgttactttctcgatcagttcttcctgtactttcggaagatgaagatcaactttgtccccggatgcatcactgtttccggtatctccttcttctccctccagagtctcatcaagacctacgcagagtatgactacatcgctgttttccgctgtaattactgcctcagaaattctgtcctgatcccatgccagattttcaactttgtctttatataaatcacatccctgagagtaaaggatccttacatcgtcacctgcttcttcacggattccttcaagaacagtaatatattctgaagatgttccatgataatttccaataagagctgcacggctatttgcattcgggccgatgacaccaatagtatttacttttgttttatcaatcggaagaactccatcattcttcagaagtacgcagctctttcttgccatcttaagagcttcatcaatgtgctctttgcactctaccacactatacggtatcttatcatattcacttccgtcaaacaggcccagcagatatctggttgtcagcagtcttactgcggattctgtaattttctcttctgttaccagtccatcctgataagctcccatcatatgaagataggtatttccacagttcaggtcacagcctgcatttaatgccatagcagcggactgtcttggtgtggaagttaccatgtgatgttcatgaaagtcacggattgcccagcagtcagaagtataatgaccttcgaatttccattttcctctcaggacatcttccataagatatttatgtgcacagcagggttctccgtttgtcctgttataagcacccattacagcctcaacatccgcttctgttacaagcgcttcaaaagccggaagatatgtttcccacatatccttcatgcttgcctgtgcatcaaattcatgtctgagcgattccggaccgctgtgcactgcataatgctttgcacatgctgccgctttcattacaggtccgtcaccctggattccttctacgaatttcacgccaagtctggacgtcagatatggatcctcaccataggtttcatgccctctgccccatctcggatctctgaaaatgtttacattgggggaccagaaagtaagacccttgtaaatatctctgtcttcttttgcagaatatgcattgtattttgctcttccctcagttgcaatgatatcgccaacttttttcatctcttcatcgtcaaatactgcagccattgcaattgcctgtgggaacatggttgccacacctgctctggctactccatgcagtgcttcattccagtaattgtatgccggaacacccagtcttttcacgggagcagcatcgtattttaactgggaagccttctccagaagcgtcatctgtgataccagtttttctgctttttttcttgcttctgttctttcttttctgtgatctttcatttcagatcctcctgtttatataatttgataattattcagcaggtattaacaaagcctcagcgcagcccgctactcctgcattatgtattctgcatttcttctctgtatttcgtcggagattttcctgtatgtttcttaaatgccagtgagaaataattcgtatctctgtatcctaccatcatagcaatctttccagtcttgatgctggtagtttccagaaggctcttcgccttctcaatcctctttctgacaatgtattcattacatccttcacctgtaatccgcttaaataatctggagaaataattcggtgtgatatagagactttccgcaatgctggaaaccgaaatatcctctgcaagatgctcatctatatagtgtctggcattggaaatggtataatgtacatcctcttcatcattttcaataagctgctcaataaacattctcgtaatctcacaggcctcttcttttcctgctgatgacagactcttggagagtgcatccaactttccttcttccacctcacacgatacttccatgtaggaaaaaatcaaagaggaggcaatctcgaaacaacatctgcgcacagcagaaggggaaagattataggattctgttgccttaataaaggtattaaatgcctttagtacataatctggagttcctatattggaaatcatgatatttcgcagttctgcatagatttcccagaagattttcttcttgttctgagcccccatcgtctgtataatgtcctgaatattctttttttcatgttccagaagatatctggcatcattgtaggaaattgccagattttcaaatccttgcactgcacttccaaccgtaatctttggtttatattcaaattcatccttcagcacatccgacaattcttcaatctgttccagaacgctgtcgtcatcatccttttcaaaacagacaatcgcaatcgtaccgtcatcatctacaaatgtgattcctctgttttgggaatccaccatgctcatgcagacatttttaacagtcattgcacggaattttccgtcattctgctgttctgtatacattccctgttccagaagaatcaggctcattttctgcttaatatcaaactgaaaatctttctggagaatatacaactgcatctctttatctgcttttgtatgcaccaaatttctcatgcactgctccagtctcatctgcactacagagccttgagagcgccacactctggcctgattctgctctttgttttcctgctctttcagttcttttatctgcttttctatcgcattgaaaagatcatcttcatcaatcggtttcaggaagaaatcctgcacctgaagccgcaggctctctcttgcatactcaaaattatcaaagcctgtaagcacgatcacacgcagttcaggtactgattctctggccgctttaatcagttccagtcctgtcatttctgtcatctggatatctgtaaccataatttcaggaccttcttctttaagaatcttcaaagcctcgtttcctgacgcagcagtaaatacgtcatctactcccagtttcttccagtctattgcatttttcatacccatgcgtatcatcttttcgtcatcaacaatcagtactctatacacacgtccgctcgcctcctgctgtgttctttttgatttctgtctgatatggcagatggatcacgacagttactccacccgaatcattcttctggtaattaagaccatatccctccccaaaaagaagttcaatcctcttgtttacgtttcgcactccatatccaaaagaatcctcgtatctggagagctgttcattcatttcatctatctgttcctgactcattcctgtgcctgtatctgatacctttatgataacttcatcctcatttctatatgctgtaagataaagtgtacctgtttttccctcttttactttcattccatgataaatggaattctctaccagtggctgcagggtcagcttcggtatcaggctttcttccacctgagattctacaacaatctcacttccgataatgttgtcgtatctcatgttctggataatcatataattcctgatatgctctacttcttctctgattgtgatcacgtcatgtcctttgctgagacagatcctgtaatatttcgccagcgcctttaccattgtggaaatctctttatttccttcggcaatcgcctgccagtggatacattccagtgtattataaagaaaatgcggctgaatctgcgactgaagggcattaaaacgaatctgctccagctgatgctgttccagttttacctgttccatcaacacctcgatttcatccatcatagagttaaaaccaattgcaagcttggcaaaatcctcgcccatattgtcaacattgatccttgttctcagggaacctgtcgcaacataatccatcttagatactaccttattaaggggctgatacattttcctgaccagtgctcttataataatgcttactatgatcagcactatgatcagaaccagaatcacaacaaccattatatggaatcctgattccatcagtttataaaaagaaatcgaactgactacataataattccagttcttaatcttctggcatacatacatattcccattctttgtaaatatctgtatccctttttccatctcatctatataatttacgtaacggcctgtctcctctttatcattcgaaagcagtatcattccacctgtgtcaactactcttgtttctgctgaagaatctcctacagccagcatcctctgtactgccggatcatcgaaattcatgcacagaagccctcttgcatcagatacttttctggtatcatataatggataatacagactcaatgtatatctgttccctttataataatcgttataataatcgttattataggaaactttcagcgttcctttctgcgcatatttgcttctctcatatgcctggggatacacttcttcaaactgcgtaactgataaagaaccctttcctctgtagtagtaacttttataatccgaactgacaatggcagcaaagttcagactctcatacatattattcagattctccagcttgctgtaaactgcatcaatgtctgctgtcttcagctcatttttctgcacctgcctgcagtaattctgcacagaatcatccatgatcgtacccaatacgatttctttatatgaatccattgatcccttaaaagattccgcaactgtattattctgcatctgcagaagttctacagactgctctttcatcgatgctatagaaaaagtcagagaaacacctgcaaccgtcagcgttacaataagaatactgacggtcacaagtaaaagtatttttttatcaaatttccagtagctgaattttgttttccatttgttcatgttgtctttcctcatctgtcacataatttcacatatacccacatgatcaggggtgattttatctccccaatatcataccatgttcaatggtaaatggatacaacagatttcgcagaaagaatcaaccctttacagcacctgcagtcataccttttaccagtttatcctggaaaataataaacatgataaccattggtaaaagtgttaatgtaagaaccgccatgatcattggtgtattcatagaatactgtccctgaaattcccagattgccaacggcagggtacgattctgggcagactgtgtcagtgtatttacaaatgagaattcattccacatatttacaccattgtaaattgccagtgtcgccattccgggtttggaaagcggcaggatcatggagaagaacatctgaatctttccacatccgtcaatttcagcagattcttcgatttctctcggaatctctttcataaagctggtcaggataaatacggaaatcggaactgcgaatgcgacatacggtccgaccagtgaccagattgtatcataaagtcctgttgactttgacattttgaatacagggatcaatgtaatatgtacaggaatagacatacaggctacaataatcgcataaatcggctgtgccattttaaacttaaatcttgccagaggataagaagcgcatgctgaaataaacagcagcaggatcagggagattgcaagaacgatcacactgttcttgaagtaatttgcaaaccctcctgtaagtacctcagtgtaattggaccagttcagttgatcaggaagctggaatacacccttggtaagcatctcaaatttctctttgaatgagttcagcaccatgaatataaaaggtgtaaatgatacaattgctgcaccgatagcaagaacaaaagcaatgatccaggctatgatgctttttcttctacttttcttatagctgtccatcccttaatcctcctgttttccgtttataagtttcatagtaatcatagataccattgtaatcaggataaacatacctcctgcaatggctgagccataacccatgttaaagttcttgaatgattctttgtacatataggttgccatcagctctgtagcagtaccaggaccgccacctgtcataacatagatcagatcgaagtatttcagagatccaaccattgaaaggatagctgcactcttaattgacggaataagaagtggaagtgcaatcttccagaaatactgtcctcttgtagcaccatcgattcttgctgcttcaaatacatcatatgggatgtttgtataaccagccataaagtaaaccatgtagaatggtgtaaactgccatgcaatgataagaataactgtgagcaatgctaattttggattaccaagaaggtcaatgttgccccctccgaaccatccggaaattgtgctgacaatacctccgtttgttgcaagtgcgtatgtgaaaaggaaaccaattgcaacagaagacataagcattggaataaaccagataaccttgaaaattgtaagtttcttaccgccaaagtcaaggaatgttgccattgcaagtcctaacggaatctggataatgatagataggatcatgataataacgttgttcttaaatgctatccagaattttgtatctttgatcagttttgcccagtttgcaagtcctaccatcttcttgtctgcggaaataccattccactggtatccgcttgtaataaatgtatcaataatcggatacgcgataaatactactaataaaatgataacaggtgccagaaaaagtgctgctgtctgacgtgtttttctctgtcttaactgaaccagagatatccctttttcattcattttggtgcctcctttttaatactttctgagatttgatcatctgacctaacgtatgccagagtatgtttgaaaaatgctttcggaatatgttagagatatatttctgagatggtttttatatattttctgacatgctgtctgatatgtaatttgacattgaaatgatttttcaagcacgctctgtgtactcacatattgtttttcaagataaagggttctgcactttcagcatgtgcagaacccttcttttctacccttactcaggtcagaatgaatgcctgctttcctttaaagattattcagcatcatctgctgctgcatcatctgtagctgcatcatctgtagcttcttctgcagtatcatctgctgcgccggaatcagatttggtacttaaatattcgtccattgctttctgcatttcttcctgtgcttcctgaggagtctttgtcagaccaaatacttcctgtaagccatcaagatgtgcagttgcaacagatgttggcagatactggtcataccacaactggatagaagatgcttcctgagctgcatcaaaaatttcctttacaacagggtctttgatgtggtctcctgcatcttttacaggaacaatcttgttgttagagtatgtaatgtctgcaacttcatcagataaatgatctgttgcacattcaaatgctgctgcaagtttatcaccttcacagttgaaggaaatgaactgatcacctacagtaccgatctggattgtaggatcagcatcggaatcatcaattgcagggaatgggaaccagccgatcttctgatagaattcctcactgtcagtctggaatgttcctgtataccatgagccacagagaagcatacctgctgtctcctgatacattaactgttttgcctgtccgtcatcttcgcttaaggagtttacgccatccgggaagtatccgttgttaacccactcctgaatcttctcacctgctttgatgaagcagtcatctgtgaatttaccggttcctgcaactgcattctggaatggttccagtccgccataacgtgctgccagagacatgaagtacatggaacctgtccatttggaagcattagcaagtgcaaaaggtgtaattccgttttcttttaatgttgcacagatattttccagatcagctaatgtcttcggttcttcaagtccgtactgtttaaacatatctttgttgtagaagatacctgccagagaaacattcagatatgggatcgcatatacatgtccattgtagcttccctgttcaatagctgcatccagaagtttatctttaacatcggactgatcaagaagatcatcaatcggctgagcaaatccggaatcaatatattcatacatcggaccaccggaccagcttgagtacatatcaggacactcaccggagctcatcgcgataacaagtttttccttgtatgtatcgttctggatggctacctgatttacagtatagcctgactttgtttctttgttgaacttatctactgctgcggtaacaatatctttatccggactctctaccgcgatattccagtaggtaatttctttgtcgtcagctgcaaataccgttgtctgcgctgccataggtaccaccatagctgctgtcatggcaagtgccataatcttatacattctttttttcatttcttgtttcctcctttttttgttcactttgtatatttaagtgtatttatcatagcattccattcacataatgcccataaaatattctgtccaaaatctataaatttctgtctttccgttttctgtgtgcagaaaattatagatatctgtactggaatctttccaaaaatgtcttctgagaaccagcaaaaattgctttcaaattttaatttttttattattttttgactatttttccattatttgctttaatataaaaaggaagtcccacctactgctcattacattttacaattaaagcagaggacttacctgattcagttaacctttcaatctataggaggtcgtttacatattatgagaaattttgaatattacacaccaacacaggttctctttggcaaagatacccaccttcaggcaggttccctgctgaagaagtatggagccaaaaaagttctgatccattatggaagtcagagtgctgtccgttccggactgattgatgagatcacttctaatctgaaagaagaaggtcttgaatacatcaccctgggtggtgtcattcctaatccacttctttccaaagtccgcgagggaatcgaattatgccaaaaagaacatgtagactttatccttgctgtaggaggaggaagtgttattgactcttccaaagccatcggctatggcgttgccaatccgaacaatgatgtctgggatttctgtctgaaaaaagctgttccaaccggctgtctgcccattggtgtcatccttacaattgcagcttccggaagtgaaatgagcagttccagtgttatcacaaatgaagaaacaaaagaaaaacgtggatgtgcaaagacagattactgcaggccgaaatttgccatcttaaatccacgtctcacctacacactcccacagtatcagacagaaagcggatgtgtagatatcctcatgcacaccatggagcgatattttgtaaatattgaaactatggagattacagacagtatcagcgaagctctgatgcagacagtcatttacaatgcccgtattcttatgaaagaaccagacaattacagcgccagggcagaaattatgtgggcaggaagcctttcccacaacggtctgaccggatgcggtacaggtggtggtgactgggcatgccaccagcttgaacatgaactgggaggtgtctacaatgtaactcacggagcaggtctggcagctatctggggaagctgggcacgatacgtctacgaggtgaaccctgaacgttttgctcagtttgccaccaatgtatttgacattccatgtggaactgattataaagaaacagcccttgcaggaattgaagcaatggaaaatttcttccggtctgtagaaatgcccaccagtttacatgaactgggtctggatctcacagatcagcaaattcatgatcttgcattcaaatgcagttttaaggacacacgcaccattggagtctttaaacagctcaatatgagagatatggaaaaaatctaccttatggcaagataaaataaatttttgttataactttctcttttttcgcaaaaatcataaaaattgcttgcattcaaacaatcaatatgctatgataaggtctgtgatacacaacagttcacagaccaaatgcccagatagctcagttggtagagcagaggactgaaaatcctcgtgtcgctggttcgattccggctctgggcattttttattttctttttttgctcacggctggttagaaaaagcctgagcattttttattttctttttttgctcacggctggttagaaaaagcctgggcattttttattttctttttttgctcacggctggttagaaaaagcctgagcatttttttatttcattttttaatattgtcttctctcactttcagcagtataatttttccagagtatgtttgaaaaatgctttccgcaagatgtgcgtcacaatttgtgggaatgatttttcaaacacgctctagagtgtgtctgaaaaaggctttctgcaagatgtgcgtcacaatttgtgggatattttgcccggatgagggcgccgtagcgggctacggcaactgaattcgggtgaaatatcccgcaaagtggggcgtgcagattgcgggaatgatttttcagacacgctctaagactatcatgaaattttgtatcaatatcatcacaattttcccaatattaatacaatattttattgaagcaatatttcacataagaaaggaactaaactcatgagtgactttaaagtcgagactaaatgtctccattccggttacactccgtctaagggtgaaccatgcgcactcccgatttatcagagtaccacttataaatatgatactactgatgaaatgggacagctcttcgatcttaaggcagaaggatacttctatacccgtctgcagaaccccacaaatgatgctgtagcagcaaaaattgcagatctggagggtggtgttgccgctatccttacctcttccggacaggctgccaacttctatgcagtcttcaatatctgcgaagcaggtgatcatgttgtggcggcttctactatttatggaggaacctttaacctcctggctgttaccttcaaaaagcttggcattgactgcactttcgttgacaccgatgctagccctgaagaaattgcagctgccttccgtcctaatacaaaggtacttttcgcagagaccatcgcaaacccggccctggtaattcttgatattgaaaaattcgcaaaggttgctcacgaacatgaagttccgcttattgtagacaacaccttcgctactcctgtaaactgccgtccttttgagtggggagctgatatcgtcacccattccacaaccaaatatatggacggacatgctgtgcaggttggcggagctatcgttgacagcggtaactttgactgggatgcctgtggacataaatatcatggtctgactgaaccggacgaatcttatcacggtgttatttatactaaacagtttggaaagaaggcttatattacaaaggcaacctctcagctgatgcgtgaccttggctccatcccgtctcctacaaactgtttcctgttaaaccttggactggaaactcttcctctgcgtgtagaacgccactgctataatgcacaaagaattgcagaatttctgaatgcccatgagaaagtatctcacgtaaactatgccggacttcctgatgacaaatactatgcacttgctcagaaatacatgaacgaaggcagaacctgcggtgttatctcctttgaactgacaggtggtcgagaagctgcagtccgctttatggacagtttaaagcttgccaccatcgcaacgcacgtagcagcatccaaaaccatgatcctgcatcctgcaagccatactcaccgtcagatgaacgacgaacaacttgcagaagccggtgtatcaccgggaatgatccgtctctctgttggtattgaaaatgtggatgacattattgctgatattgaacaggcattacaaaacgcataaaagataatttcaaaaaatccgaaagaacttctgaaatgatcacagatataacagatcatttccagattcttccggatttttattttcaaatcaaacggatattcgcaatccgctttgctacttgattcggttaaattctttcttattttctactttaacaaataaacatctgtataatatacccctttgtcctccccttcctgatgggtagcaacataaatatcgatacaattatgtttaatcgcaccaccgcaatcctctgcaacataaacctgtccattgatcacaaccttagatccatatggaatctgtgtaggatccaccgcaatcgtacggtttgtcgtagcagtcacccctgtagaagtaataccatttgcccaagggccacaacaaatactgcaggaacaataatgagtaatcttaaaggttcccagcggaatcagtgacgcatctgaagacacagctaccggagtacccacctgcactccatctacagcctccccttttgaagcagttacgccatccacagcctctgcaaaaacgcctttgccttcacttttatgaattgttcctgcttcttcaccgtctactttagcgacctttgactcctctgttttctcctctgctgctgtattctccaaaacactggtaggaatatatccaatgcctctttttccattctcttttttatagtaaatctgactccagatgccatttactgtagccaggcgcttcacttcatcctcctgaatgacctcacctactacctgtccatccttctttcccggataatccagaatatcactgtccttcagtgctgtaaaagttccctttgcctgagcaacctgatcactgtcattgatatgttttgtgggcacatagccactgatcttttccgtaccctttttgctctttttctcataagtcactttactccagccattatcacatacggccactctctctacaccggtaccaagatacactcttacaagcttctttccgtttttccccggcatagagcgtatataagttgcctttgcagaaacagaaaccttatccgacttggcaactgccgttaccttctctccacttccatcatcaatctcaaaggtctgcggtatcttattatcctccttataagcattaattgtcccctcataatccagaatatccgcagaaactgttgttggtaaagtaagcatactgcaaactaataatactaaaatttttttcttcataaactgagcctcaactcctttatagtctctctccgtctgtcctatcatagcacaccccctcccaatttgcaattttccagttactgttcactccgttctcagtaacgtagccaaaattcattccagattgcctgcggcaatggaattttggcttgtatgtctcgggattttggcatactcatgccaaaacacctcgcgggatagtggtgtgtgaacagtaacattttccaccccatccttcacggaatcttcataaactatattgcttctatgatttctatatgctatagtaaaattatcagaattctattctgccttacgaaagataagataaaatataaatattttttcgtaaaggagtgagaaatctggaaattaaatattcaaaacaggcccttaaatttttaaagaaacaagatactattactcaaaagcggattcttaatgcaatatcagttctcccaaaaggagatgttaaagcattgcaaggcaaagacggttatcgactacgaataggcgattatcgtgtaatttttaataatattgacaatattatttttattagaatgattggcaatcgtggacagatttataaaggagtgtgattttatgactgctgttaaagaacgtattataggtgctgtatcaattatgagtgataaagatgctaatatcttctggcatattattcaaaaacattttaaactgcctgatacattcgcagatatagaaaaagttgaacccgatgaaacagatttaataatgttaaaggaaatcgaaaacaaccctgactgtcacgaattcatttctcaggaagaattaatgaaagaacttaatatgtaagtattgttccctgaaaagtgccaatttcagcacttttcagggagtcataatttttcaataaaaccatcataaaaaatttcaaaataaataaaaaaacatttgacaaactccactgcatatagtatcatatattttgtcgctgaggtaatcactcaactgacatcataaatgcgatagtggcgtagttggtaacgcgcgaccttgccaaggtcgagaccgcgggttcgagccccgtctatcgctcttaaagcatcagctaaggctgatgcttttttcatccccttctattaactttccataactatagcaattccatatctgcgaataacatctatagccaatatccttgattaacatccctgagtcaagcgtatattcgcaatccgcttcgctacgcggctctacaccagcgcaggacattatatgtttttgcccgcatttgcaggagtcttagaaaaagttagcgccaggaaatctgcgttatgtaaaaaaatttcactgtctgagccgcatttgcggcgagtttgaaatttttttacatgtttttagcagatttcctggcgcttaatttttcttaggctccgaaaccgcggacaaaaacatataatgtcctgcgcgtccccataccagcaccttagtgatggaacaatctgataccagtaaaactcatcaccattccatatttattgcaagtctcgatcacagcatcatcacgcacagatccacccggctgcgcaatatacttcacaccactcttatgcgcacgctcaatattatcactgaatgggaagaatgcatcagatcccagtgtaacatccgtcatctgatccagccatgcacgtttctcttcttttgtaaatacttccggtttctctgtgaaagttttctcccacataccatcagcaagtacatccatatattcatccccgatataaacatcaatggcattgtcacgttccgcacgtgaaattgtatctttaaatggcagattcagcactttcgggcactggcgaaggaaccagttgtctgccttctgtcctgcaagtcttgtacaatgtacacgtgactgctgtcctgcaccaacaccgatagcctgtccatcttttacgaagcatacagagttggactgtgtatatttcaggatgatcagagaaatcttcatatcacgttttgcttcctctgtaagctctttattctctgtcacaatattggaaagcattgcatcatcgatctcaagctcctgacggccctgctcaaaagttacaccaaatacttctttgtgttccagcggagccggtacaaagttctcatcaatctggatcacattgtagtttccttttttcttctgcttcaggatctccagtgcttcctctgtgtatccaggtgcaataacaccgtcagatacctctctcttgatcagaagtgctgtatctttatcacacacatcagaaagagaaataaaatcaccaaaagaggacattctgtcagcaccgcgagctcttgcataagcgcatgctaatggtgaaaaattcttccagtccatatcatttacccagtagatctttgccagagtctctgtaagaggaagtcctacagcagcaccggcaggagatacatgtttaaaagatgtagctgcaggaagtcctgttgctttcttcagattggataccagctgccaaccattaaaagcatccaggaaattgatatatcccggtcttccggaaaggatctttaccggaagctcagatccgtctgccatataaatttttgcaggtttctgattcgggttacagccatattttaattcgaattctttcattatataaatcctccgtatgaaccaaataagtattttaaaattaattcctgtaaataacttcttactgcgaaagcatcgtcttatgttcacaataatctatgagcactatctgtactcagtaagtgactattatttattcttattaatgatcttgctttcgtacttacctgtctcaatatcaatatatcttacaaacagagatactttgttatcttcgttcaggctgttccagagaagttctgcaaactcatccatatcatccggaattgctaccagtttcggttcgccttcaaagcttggaagtggatttccgtcacatttataagtatggatgaaatgtccctctcctgcaatggcattctcatatgcaaatgtgtatctgttacatgcatccggatttccgttgttgctcttgagaattgacattgcatagttgaattttccgttctctacgtgcataacaccggagatacgaggtgtatagttcggaccgtccggctcgaattctctgcttcttaaggactgctcaaaagtaagctgatgatccattccctcataaatggtatctgtctgatctccgttagttacgattgttttgtttcccagtacacgtacaggtgcatagatgatcagactcggatctgtaagtttggacggatcaaatgcctgggtacggattccctcaccatcctctacaaatactctgtttctgctgttctcgcttctgcccatgatgaaataagctgtcactgctttcttaccgtctgcggaacgtccaatcacaattcctctgccaggataggaattctctttcagttctttttccagtgataacatttccataatttttctccttttcgttaaaaataaggttaaaaaaagcctgggaaacctatttattcattgaataatttccaggctgcccaggcggtcggctcatatactcgctgcactccctgtaggtaatcctacttccgccagtcatgcaggcactgttgtgaaaaaaaatcacacgttgttattatagtacaatacttctttgtggatttcaaggcaaatttttttgtactgtgctgaattttcgttttactgaacatcctgcaaaccataatcaacatcaatctgcgccgcaatatccgatttcatctgtatccatgcatccggattctccacataatatttcggacagttttttccggtaacatcataatgccggatcacattctctgatgtaagtccaaaccgcacgcacaaccacgcagaaagcttcactgccgaatcataagttgcctcattgaatttccccgtctcatccggatgacagcactcgatggacaaagtatctacattacgtgagttcgtcgcataggacatctctgacgtaggaatacactgcaccacttccccatccagccccactacaaaatgactgctcacctttgtgtcatgagtagtcgccagattctcgaagtagttcctgtttgcaatggctgttgcccccggatttgcagtataatgaatggcaatatactgtacactctcaatgggaatctgcggtctggaatattcattcggcgtcagcagttccacatctatgtacggcgccccttctttttgccattgttccggtccgcctgaagaatccgtattgtctgttcctgactgttccccatcagaaaccatcgtgtcagaattatgtaaaaagtccccaatactccatccattttcaccggcccgatttattatgatccacccaatcagaactatgatcacgagcagcatgagactcataagaattctctgatttctctgccttactctactgctctttcgtcttttcgacctgctgtttttcttttttactgcagttttccctgttctggtatctgtttttttctttttgtttatatgcttttgcatttttaccttctcttacgggattttactccctgcaaaaaataccccggccggcatgcctggaaatcttatttctttccatcagcagccagccggggcatatattacacctgaaatttattatttgtcatctacgctatagttcggagcttcttttgtgatatgaatatcatgtggatgagattccttaagagatgcagcagaaatcttgatgaatctgcctgtttctttaagcttctcaatagtttctgctccacaatatcccataccggaacggagaccgcccatgagctggaatacagtatcctcaacatgtcctttgtaagcaacacgtccttctacgccttccggaacaagtttcttcgcattctcctggaagtaacggtctttacttccgttctccatagctgcgatagatcccataccgcggtatactttatattttctgccctgatacagttcgaatgttcccgggctctcgtcgcatcctgcaaacatgcttcccatcatgcagacattcgcaccggctgcgattgcctttgtgacatctccggaatacttgataccaccgtctgcaatgatcgggattccgtattcttttgcagcttcgtagcagtccataacagcagtgatctgcggaacaccgatacctgcaacaactcgcgtggtacagatagatccaggtccgataccaaccttaactgcatctacaccggcctcgatcagagcctttgtcgcagcacctgttgctacgttacctgcgattacctgcagttccggatatgctgccttgatctcgcgtacagccttcagaatgttctctgaatgtccatgtgcagaatcaattacgatcacgtctacagatgcctttacaagtgcatcaacacgtgcaagtacattagcagtgattcctaccgcagcaccgcagagaagacgtccctgctcatcctttgcagccagaggatatttgatctgtttctcaatatctttaatagtaattaagccttttaagttaaagtcatcatctacaataggtaatttctctttacgtgattttgccagaatcttcttggcatcttccagtgtaattccttctttggctgtgatcagtccctcagaagtcatgcactctttgatcttcttgctgaaatctgtctcaaacttcagatcacgattagtaatgattccgaccagttttctgccctctgtgattggcacaccggagatacggaactttgccattaactcatctgcgtccttaagtgtatgttcaggagataaatagaaaggatctgtgataacaccgttctcagaacgttttaccttgtctacctcttctgcctgcgcttcaatggacatattcttatgaataataccaataccaccctgtctcgccatagcgattgccatgcgatgctcggttactgtatccattcctgcactcatcataggaatgttcagtttaaccttctttgttaagtaagttgtgacatctacctgattcggaattacctttgaatatgccggaactaacagcacgtcatcaaaagtaatgccttcaccaatgatagtacccattgcatttcctcccttgcgtatatgaaattaaattactattgtaatgtaaaaaggaaccagcaactggtccttttattttcaacaagtgtaacaaaaatcagattctatgtcaatccaaaaaaactttgctcggtgctgaatttttcatagcctgtgcaagtgcctcatccggttccaggatgatcttgcataaatttccgtccagtcttgtgataacaccaaagcgtttatgctccggatttcctgatgaaaagtccagtactttcatgttctggtttccgttgtaatagtccattctgtgggaatccagcggtgctgccagatctgcttctgataatttgaagctctttactttctttctttttgtctttgacatgatcatgtcgatgtcaaaatcgccattgataaacagatattcatattctacatctgttttcgggattacaaaatagcatgcaattccaagcgctacggcaatgatcagcgccagcggtgtgatgataagtccggcaaatactgccagcactgtcaaaacgatcagaccgtatttgagcaggctgtctttagccgtcttatctttctttaccagtaattctgaatacaaatcgcccattgtttcgtctccttttcatttgttcagctgttgaaagcagcttttttttgcacagcatatttaacaattatattttattcatcatgctgtttttctgcattatatcacaaaacggaaccatcgtctatgacgacggttccgtttcacatattccacctgtactattgttactgttcacacaccactgttccgcaaggtgttttggcatgaatatgccaaaatcccgagatatacaagccaaaattccattgccgcaggcaatctggaatgaattttggctatgttactgtgaacggagtgaacagtaacgtactatttttatctgagcatactgcagtataattttatcgtttattaaaaattacatcattcccattccaggattagcagccggtgcaggtgtgtcttctttgatgattgcaacagcagattctgttgtaagtaatgtagatgcaacacttgtagcattctgaagagcacttcttgtaacctttgcagggtcaaggataccttcgcttaccatatctacatatctttcattcagagcatcgaaaccgattcccggttcggattctcttactttgttgatgattacggaaccttcaagtcctgcatttgcagaaatacggaacagaggagcttccagagctttcaggatgatgtttgcacctgtcttctcgtcaccttccagagttgctgcaagttttgcaacttctttggatgcgtggatgtaagcagatccgccacctgcgatgataccttcttctactgctgctcttgtagctgcaagagcatcttccagacgaagcttagcttctttcatttctgtctcagtggaagcaccaacacggataacagctacgccgccagccagttttgcaagtctttcctgcaatttttctttatcaaattcagattttgtttcttcaatctgtccacggatctgagcaacacggtttgcgattgcatctttgtcacccataccgtcaacgataactgtgttctcttttgcaactttaacagattttgcacgtcctaactgctccatagttgcgtctttcagttccagaccaacttcttcggagattacctggccgcctgtaaggattgcgatatcctgaagcatttcttttcttctgtcaccatatcccggagctttgacagctactacctggaaggttcctcttaatttgtttacgatcagagtcgtaagagcttcaccctccacatcttcagcaatgataagaagtttcgcaccaacttttacgatctgctccagtaatggaaggatttcctggatgttgctgatcttcttgtctgtgatcaggatatatggatcttccagatttgcttccattttttccatatctgttgacatatatgcggatacatatccacgatcgaactgcataccttctacaaggtcaagttctgtgtgcattgtcttggattcttctactgtgataacgccgtctttggaaactttttccatagcatctgctactaactgtccaacagtctcatcgcttgcggaaatagatgcaacgtttgcgatctgtttcttgccgctgattgtctggctcatgttcttgattgcttctacagctacatctgtagctttcttcataccttttctgaggatgatcgggttagcgcctgctgccaggtttctcattccttcgtgaaccatagcctgtgcaagaacagtagctgttgttgtaccatcacctgctacatcgtttgttttggaagcaacttctttgatcagctgtgcgcccatgttttcaaatccgtcttccagttcaatttcttttgcgattgtaacaccgtcgtttgtaataagcggagcaccgtatggtttgtcaagaactacgtttcttcctttcggtcctaatgttactcttactgtatcagctaatttatttacaccagcttcaagagctgctctggcttctgcgccgaatttaatttcttttgccatgataatatgacctcctgattcaaattctgatttctatgaattctttctgatacctatccgatatctcatgttacatcctgtaaatattatcttacctgcaaatattatcttataagtatcttcatttatgttttctattttgatattgcttatttaacaattgcaagaatatcattctgttttacaatgatatattctgtgccatccatttttacttctgttcctgaatatttggagtagataactttatcacctacagctacttccatttttacttctttgccgtcaacaactccgccaggtcctacagctacaacttctgcctgctgtggtttctcctgtgcctgtcccggaagaacgataccggattttgttgtttcttctgcttcaacctgttttaatacaactctgtcacctaaaggtactaatgtcatgatctatatcctcctttattctccaactaaagctttcctgttaccgtactctttccattattgcaaaatatccggtaactgtttcggcactctgtctaatcctgccgatttttgctagcactcatttacttcgagtgctaatcactgtccttatattattgaaaatgagtcgatttcgcaagtgcttttatcattataaaataatctatattctcttttttacttatatattctctttttttcttttgttttcttaatttacaaataattttgtcctatcttccttgtctttcgcactcaattgaattgtcttcaaatacatcaattaagaggcttgctatagttcctgtaacataataaaaagaccgtccaccatacagcagacagccttcttgcattcattatttatggaagcttctatatcaggatttcttatttctctgagctttaatctcttccagttcatcaaagatgacttcattcagcactttaatgtaggttcctttcataccggaggatctggattcaatcacaccggcactttcaaacttcctcaaagcgtttacgataacagatctggtgattcccacgcggtctgcgatcttacttgcaaccaggattccctcatctccgtcaagttcatcaaaaatatggatgatcgcctccagttcagagaaagataaagtattaaacgcagatttcactacctgctgctttctgtcctcctcagcattctcttcatgaaccgctctcatcatctcaagccctacaacggttgttccatattcactgacaataatatcttcaatgtcatatggtttctcataacgatacataaatacagtacccagtcgttcccctgcaatatctatcggattaatgattccctgataactgcttgatacatgttcaaatcccagtgtctgaagatttacattctcttttgttgacaggacacccagaaatctctcgtttaacagggaatctacatatccgccaaccttgtcctcgatcagttcagtgatctcctctactcccgggcataaactgacacccagaacctttccttttttactgagaaccagaatgttggaactcagtgtctccatcagaacctgacagatgtcattaaataccactttgctggaactgctgttatgcagaagtttattaatttttcttgttctatccagcagctgaacactcatattgtcctcctttcaccctgtacatatccgaaatctttctgtcattatttcataaatgagcagtcactttcttttgctcgcaaggaagattcagacacacatggtcattaacattactgatactttgattttacacgttttaaagtcaaattacaagacaaattttactatttttttatttatttttgcttttctgaaaatagattccttttataatattattcaataaatatcatcatcaaaaattcaaaggattgaagacaaaaagtcagaaagtcactgactgtaagacaaaaaacggaactgttgcattaatgaaattcattttcaactgctgcaacagtcccatttataacatttacaatccgttattattctttctcgtcctttgcctctacatatccacatgtctcctggctgcagacaagcttattccccttttccaccatatagcttccacatttcgggcatttctttgctgatggtttctgccaggacatgaaatcacaatccggattatcctcacatccgtagtacttacgtccttttttggttttcttaagcacaatctcttttccacatttcggacatgccaccccgatcttctcaaaatatggtttggtatttttgcattccggaaatcccggacatgcaaggaatcgtccatgaggaccatatttgatcaccatatgtctgccacagttttcgcagatcacatctgtcacttcatcctgaatatcaaccttttcaagttcttcctctgcagcatctacatccttcttcagatccggatagaagttgcttactactgtcttccactttacagttcctgctgccacacagtccagaagcccttccatagtcgcagtgaagtttacatctacaatactcgggaaagcctgtttcataatattattgacaacttcccccaactctgtaacatacaggttcttctgttcttttgcaacataacggcggctgatgatcgttgtgatcgtcggcgcataggtacttggacgtccgatccccagttcttccatagtcttgaccagagatgcctctgtataatgtgcaggcggctgcgtgaaatgctgttctggtttcagttccttaagactaagcttcattcctctttcaagactctgattcagaacatttccttttttctggtcctcttcatctgtgtatacagacataaatccgtcaaatatgatcttggaggcagagactgtaaaaatatactggtctgcaccaatctttacagatgttgtttcatattttgcaggagccattctgctggccgcaaaacgtctccagataagctgatacagtctgaactgatctcttgaaagagattccttcagtacagccggtgtacggctgatgtctgtaggacggatcgcttcgtgagcatcctggatcttctgtccctttttcacagctttctcagactttgaaacataatcctctccgtactgagcagtgatatattctcttgcagcagcatctgcttcctctgagattcgggtggaatctgtacgcagataagagatcacacctaccgttccatttcctttgatatcaattccttcatacagctgctgtgccagacgcattgtcttctgtgtggaaaagtttaaggtcttggctgcttcctgctgtaaggtacttgtagtaaagggaagcggtgcattcttgatcctctcacctttctttacttcattgatctcatattctttatctttcagagaagccagaagtttatccatttcctctttgctgtggatatccatctttttatctgttccatagaacttcgcctgcagcggtttcttctcacctttcacctgaaaatctccctccaggctccagtattcttccggaataaacgcattgatctcatcttctctgtcacagatgatacgaagcgcaacagactgtacgcgccccgcacttaagcctctcttgacttttgcccagagaagcgggctgatggtataacctaccatacggtcaagcatacgtcttgcctgctgtgcatctaccagatccatatccaggtctctggcctgtttgattgatgattttactgctgtcttggtaatctcgttaaaggtaatcctgtgcatcttcttcggatcttcttttaatgcctgcatcagatgccaggaaattgcctctccctcgcggtcagggtcagttgcaagataaatcttatctgctttctttgcagccttgcgaagctttgcaagcagttctccctttcctctgatcgttatatatttgggttcaaaatcatgctcaacatcaattccgaactgactcttcgggaaatcacggacatgtccgttagaagcttccacatcgtaattcgcaccgagaaatttctttattgttttcacttttgcaggtgattctactatcaccagatatttcgccatgctacctctcctagtcgtaatctgttattcttcacagtgtccctgaacgggcacattgcctgacaacgatattgttacatatgaaaatcgccctgcgccgcagaaacgtgaagcacaataatcataaatcgtcaactgtcttttacataataatgtctcccgctctctcttatgagcccccgcagtgtcagttccacaagacagttgcttacctgtgccggggaaaagcctgtttttctcacaatgtagtcgggattttttggtcgtaaatcgagacaactatacaccatattcaaatctcttgcaagtcccaagttgtttttttcaccgttttgtgttactttttccatcgaaattccaagttcttccagcataatttccggacagtatgcaatccctgcgccgtcgtagatcagcttatggcagcctctgctgagttcatctgtcactgcccccggaatcgcatagaccatctttccctgttccagtgcaaatcccgcagtgatcagcgaaccgctgttttcttttgcttccactaccagaaccgcgtctgacaaagcactgatgatccggtttcgcgccgggaaatgccaggaaacaggtcctgaacccagtggacattcactgatgatcccaccattttcccataagatcctctcataaagttttctgttagatttcggatagcatacatcaacaccacttccaagcaccgcaaatgtaggcatctttccttccagtgcgcctttatgtccttctgaatcaatgccaagtgccataccgctgataatctggactccagctacacttaacgctttcgcataccggaatgcctgcatccttccataaggactgcacattctggcaccgatcactgccaccgttcttctcttaggatcaggaagtctgccttttacataaagctttgccggcatggaggaatactgcttcattatctgaggatattccggatctgatttctcaatacatcgtatctgacctgtactgtattcttctgtatgattatttttcacatcagttctttccatataaaatacctcactgacctttattttatgacagaatctttgtcaaatgccctgtacgaaagtgcttctccgatatgatgaccggcaatcatttcttccccttccatatccgcaattgttctggctaccttcaggatcctgtgataggatctggcactgaatgcgattttttcaaaggctcttgccagaagtcgggatgcgctgtctgtaagagggcagaatttatcgagcaggctgctcttcagctgtccgttaaaatttattttctcatctttataccgttcttcctggattttctgtactttttccactctttttctgatagcagcggaattttctccctttcttccacagtgaagctgtgaaaaagaaaccggcggtacctcagtgctgatatcaattctgtccagaagggggcgactgatttttcccatataatgtgtgatctcacctgctgtacaggtgcatctgtttaaatccggataataaccgcagggacaggggttcatcgctgcacataacataaaatccgccggaaagttgtaagttccgcttgctctggctatctggatcactttatcctccatgggctgtcgcagaagttccagacttgctctggaaaattccggcatttcatccagaaagagtacacctttatgcgcaagagtgatttctccgggtctgggattacgcccgcctcctgcaattgcctgaggagtacttgtatgatgagggctgcgaaatggtcgctcatcgatcagaggatgttctcttgaaagaagtcctgcaatactgtaaattctggtaagctccagcttttcttcaaagccaagcccaggcatgatcgtcggcagtcttctggcaagcatggttttgcccgttcccggaggtccgataaggagaagattgtgaaatccgcttactgcaatttccgccgctctttttgccccttcctgtccttcaatgtctgaaaaatccattcccatatctgtatttataatagaaggaatttcttcctgtatttccctcttcagatagggttccggattcttaagacactcgaccagttcccgtaaattttttactcctgctaccggcacatccctgattagtcttccttctttcagattctcatagggaactacgcaaaaacgactgcccaaacttcttgcgcacaacacaataggcaagattccggatatcccatggatttctccgtccagaccgatctcccctgccatcataactctgctgacaacctgggggctgatcatctcaaaagcagccaacactgctgctgccaccggtacatcaaaaccggctccctctttcttcatgtctgcaggagcaaaattgacggtaattctctttggtggaaactgataaccattattcttgagtgctgtgcgtacccgttcctgcgcttcctttacctgcgcagaaggaaatcctaccatgataaaggaaggaagtccgttacttacatcagcttctacctgcacagggcatacttccaccccaaaaattgcagctgataatacacttgcaaacaaatataaactcctttcttccggcataaatctcccccgatatttatgctcaccaaaaaatatataacaattcgttactgttcactccgttcacagtaacgtagccaaaattcattccagattgcctgcggcaatggaattttggcttgtatgtctcgccaaacagcggacgactgaatagttacatcacttaacttgtattggaaattatttcagaaatcagattagaaaaaagattatttttataatagaccattttgctctgttttgcaaccgttcattttgttctgttttatacttttttcagtacataatctgcgaaggcttttcacagatcatgtttgggagtacactacaaaacagagaggtgaactatatgaaatttcagcgtattcaggatttacgtacagatgctgacatgtcacagaaacagctcagcgaaattcttcacatcagccagcgttcctactctcactatgagacaggttcacgcaatatcccggttgaaatgcttatcagactggcaaattattacgatataagtgttgattatctggtaggacgcactgataaaaaagagatgaataaataagtaaaatcactttttttaatataaaaggattcctgtaactgtttatgttactgaatccttttatattttttgtatcttttattcttttatcataacagtatccacagaaggatggacttttgcaccctccgcttttgtttttgtcttaatattcacataaagacgaccattatcaaaggtaagataaccctttgctacatttcccagcgagtctgtaaacgagaatctggttgcatttcctgcgatggatttctttacttttgccttgcaggtggctgtctttttcttatttgtctgtgaataagtaaaggtaaccgacttctgactgagtttcttaattttgatcttaaccctgccgttcttactgcgccaggttcccagataatcctccgggttaaaaacataagcccgttccagaaccggtgttggcgttgccgtaggaatcggtgttggggtaggtgtgggcgtagctgcaggtgtcggtgttacagtgggaactctttccagtgccgcgatcgcttctgcttttctctgctctctgtccacattctttctgtgttgaagcagcagagtgcctgccagcataagcaggataaacaggataattacaattatcagaagttttataagtctttttttctttttattccgtttctgtttcccgttgtttgttaccgacaaatctgcatctcctcttctgtttcttgttcgttacttattcttttccatcccagcaataggtacagagtttacatggtgaaattccaatggaagctttcaggtcatcaagtctgtggaatttcagtgatgtgaaattcagctccttacggatttcttccagcatttctttataatttgttgaatttggatctgcatagtctgccaggactttatcactgacattctctccctcacgtttggcaatcacacgtcttgtgatcagatccatctctgattttgaacgtgagaaattcagatatttgcatccataaagtaaaggcggacacgcaggacggatatgtacttctttcgcaccatttctgtaaagaaattccgttgtttctctcaactgtgttccacgtacaatagaatcatcgatcatcaaaagtctcttatccttgatcagacgatgtacaggaatcagcttcattcttgcgataagatttctctggctctgctgtgtaggcataaatgatcttggccaagttggtgtatatttgataaacggacgggcaaaaggcacaccggactggttcgcatatccgatcgcatgggcaataccggaatccggaacaccggctacaatatcgggatttacttctcccctgtctctcctggccagcatatcaccgcaatgataacgcatttcttctacattcacaccctcgtatgccgaagtaggatatccgtaatatacccagaggaaagaacagattcgcatctcttcccctggtttctgcagggtttccacaccgtccggagtcactgcaacaatttctccggggcccagttctttcaggtcttcatatccaagattcaggtatgcaaagctttcaaaagatacacaacaggcatcttctttctttcccacaatcagtggagtccttcccagacggtcacgtgctgccagaatcccctttggtgtcaagatcagcatggtcatggaaccttctatcacttcctgcgcataacggattccctcaatcatgttgtctttctgattgatcagtgcagctaccatttctgtgggatttacgcttcctccactcatttccagaaaatgagtgcatccgtttttaaaacagttggcaatcagttcatccatgttattgatctttccaactgtggtaattgcaaagttgccaagatgagagcgcaccagaagaggctgaggttcattatctgaaatacatccaattcccagatttccctccatctcaccaatgtcaccatcaaatttggtcctgaacggcgcattttcaatgttatgaatcacgcggtcaaaaccacgtttcttatcatacactgccattccgcctctgcgtgttcccagatgggaatgataatcaattccgaagaaaaggtccagaatgcaactggactttgatgctactccaaaaattccacccattatcgtattctccttttgttcatcatcttcaggcaacttttatcataatcctcttcgataatccatttaaaaagattactatagcccgtttcataacgttttccttcactataacagttcttatcctgccaaattgctgtaaaaacagttatatcacacaacactcccattatatagaatgaaaatttagaagtaaagagttttaatcttatttcttttccttgatgatacctgttctgtatgcatccagcagctggatcaattcctgtattctctctttcagcgcatgacctgtatctgtatcacccacaagctggcgtctggacatgtagctgactgccacgcggttcgatacaatatcagtctctcttgccacagcatctgctttggacgtaaacggttcatgagcagtaagattcagtccataggaattatagatcagcgtatatccggcaattcccgttactttctgatatggcttggaaaaaccaccgtcaatcacgataacctttccatcacattttacaggactttctccttcactctggtgtaccggaacatggccattgatgatatgccctttttccggatccagaccaaattcacgaagcatattatctaccacttcttcattctcccagaggcggtaataagcattcttcttctcttcatgtgtagaaggatcctctatgaaatatctttcaaaagtactcatcttgctcttgccaaacaatggtgaattcggagctgcccagatataccacataatatctctgcccttcttctgttcttcttttcctacagaatagaatgctctgcgcacataggtttccagtacatcgtacagttcttttcccttgtagctttttccataaatctgtacttcccggaatgttccgtcttcattcagaggaatgcttccgtgaaacagaagatttccgttatatactgtataaagcccgcctttgtcaagtaggagacggatgtggttttgcagtttttcacagtttctgaatgcagaggacagtttgtccataacttctttttctccggctgtaagttcgtatggatgtttccagtcaatagtcggaaaattattgtcgcgaagcggatattcttttccgtcaggcagtgtgatcgtccctttttccggattgatccgatgaagaagtgctctgtcttccatctggaattctttatgtctgcgcaccagtttaccttctaatttaaactggatcacagcaatagccttgtgcatttttttgcccagttcttcctcaagaacattataattggaagcacctttcatagcaaaaatctcgcagggatcatccttatacgcctccatcacaaaggtcgccagaggaagcatattgattccgtatccatcctcaagaatatccagatttccgtaacggatactgtttcttaccactgttgcaatacaggctttctgtcctgctgccgcacccatccagacaacatcatggtttccccactgaatatccagggagtgatactgcatcaggcgatccataatgaaatgtggagcaggacctctgtcataaatatcccccagaatatgtaaatgatccacgaccagacgctggatcagttctgcaagcgcaatgataaaattctccgcactgccgatctcaatgatcgtatttacaatggaatcataatatgcctctttgtcaagaacctccgctttctctgtgatcagttcttcaatcacataggcataatctgcgggaagagcttttcgtactttggatctggtatatttggaggctgttgtcttacagatttcaataagacggtagagcgtgatcttataccagttttccatatcttcttctgtatctttgacaagatccatcttctctttcggataatagatcagagttgccagagaacgcttatcattgttacttaatgtatgtccaaacacatcatcaatcttcttcctcactgcaccggaaccatttctgagcacatgtgaaaacgcctgatactccccatgaaggtctgacataaagtgttccgttcccttcggcagattcaggattgactgaagattgataatctccgtagatgcctttccgattgtaggataaatttctgcaagtctctgtaaatatctaagttcgtctttcttcatatccatctcctgttatcatatattatgatgtcagggcattttatgttgctgtctgcaccatgccctgcaacacactttgcggtcacagaatttatgctcatcctgtaaagtcaaataatgacatctggttcgactgcgggatatctccgaataatttcagatcatccatcagatcaataaccgttttgctgacctttgttctgtcgcggaagtcgtcttttgacaagaattttccctgttttgcagcatcaaccactgcatctgccgccttatctcccagtccgtcaatagttgcaagtgacggcatcagtttcccatccacgatctgaaatctctgtgccttggcagtataaagatcaatcggtacaaattcaaatccacgtgcgtacatttcctgtacaatacgcatatccttcagggtatccagttcttttttagatgctgaatcaccttttttgcgaatttctgccatataatactccaggcgttcctttcccatacacatcagctcataggagaacgctgtggcgcggatactgaaatatgccgcatagtatgccagtggctgaaacaccttataccacgcaattctgtatgccatcataacgtatgctgctgcgtgggccttcgggaacatatacttgatcagcttacaggaccagatataccagtccggaactccatgctctttcatggtctcgatccactcatcacgaagaccctttcccttacggacactctccatgatcgtaaacgcaaggccactttccactccttttccgataaggtagatcataatatcgtctcgggtacagatagctgtggaaatggttgccttaccctcctggatcaacacctgggcattacccagccatacatccgtaccatgagaaagccctgcaatacggatcaggtcagagaagtatttcggcttggtgtcaataagcatctgcatggcgaaatctgtaccaaattccgggattcccagacatccgagcttacatccgccaatatcttccggttcaattttcaaagcctttgtacttgcaaacaatgacatgacatccctctgatccaggggaacatcccttgcactgattcccgttaaatcctccagcattcggatcatagtgggatcatcgtgtccaagtatatcaagcttcagcaggtttccgtcaatagaatggtaatcaaaatgtgtggtgataatgtcactgttcacatcattcgcagggtgctggacaggagtaaatttctcaatctcctcacctacaggaagtacgataatgcctcccggatgctgtcctgttgtacgccgcacgcctgtacatccctgtacgatgcggttgatctcacagtaacgtttatgcacaccacgctcttcaaaataattcttcacataaccaaatgcagttttctccgcaagcgtaccgatagtccctgccttgaatgtctgccccttaccgaaaataacctctgtatatctgtgtgcattagcctgatactctcctgaaaagttaaggtcaatatccggttccttatctcccttgaatccaaggaatgtctcaaaaggaatgtcaaacccttcttttttcatcctggttccacatttcggacagatcttatccggcatatcacaccccgccatacctgcatactgctttacttccggtgaatcaaaatcactgtatttgcagtccggattaggacagagataatgcggcggcagaggatttacctctgtgataccggacatggtagctgccagagaagatcctacagaacctcgcgaacctaccagataaccatcttcatttgacttccatacaagcttctgtgcaatgatatacattacggcatacccattggaaatgattgaattcagttccctgtcaagcctgctttctacaatctccggcaatggatctccatacatttcatgcgcttttgtaaaacagatattcttcagatcctggtcggaattctcaatgaccggcgggaatttgtccggatgaataggtgatatcttctcaatcatatctgcgatcttatttgtatttgtaatgacaacttcttctgctttctcgcttcccagataggcaaattcttccagcatttcctctgtggtacgtaaatacaacggtgcctgctcatctgcatctgagaatccgtttccggccataatgatccttctgtaaatctcatcctgtggatccatgaaatgcacatcacaggttgcaactaccggtttcttaaactgctctccaagcttaacgatcttcctgtttatctccttcaggtcttcttcggaactgatcatatcatgcttatcatctgctatcataaatctgttatttccaacaggctggatctccagataatcatagaaatttaccagtctggctatctcagtatccggtgcatttctcagaattgcctgatacagttcccctgcttcacaggcacttcccaccagaagtccgtctctgtactgctccagcacacttttggggacacgtggacgtctgtgataatacttcaggtgcgactgactcactaatttatacagattaatgcgccctgtctcatttctggcaaaaatgatcacatggtaggtcggcagtttcctgatagtatttacagaaacagctccctgctcattcagcatatccacatcccggatatcacgctcttccagcatctttacaaacttcacaaaaatctctgcagtacatgcggcatcatctactgcccggtgatgattttccagtgaaaccccaactgcttttgctaccgtatccagcttaaatctgttcaatgcaggaagcaggaaacgggccataccgaccgtatctacataagtaaaatcatgtgcgattcccagtctgtcacagtttttcataataaatcccatatcaaagtccgcattgtgtgcaaccataaccgcatccttgctgaattcaaggaatttcggaagcacttcttcgatagtcggggcatccatgaccatactgtcattgatactggtcagctgttcaatgcgaaaaggaatcggtacctttggatttacaaatgtggaaaaacggtccgtaatctcaccattttctaccagtacggcgccaatctctatgatctgacaggtcagcgaagaaaaacctgttgtctcaatatcaaagaccacaaatctaccgttcagcttctgaccttttccattggtcaccataccttttaaatcatctaccagatagccttccattccataaagaaccttaaaatcagaatccttcggcacacatccaccccaggcatcgaaacagtgatttgcctccggaaacgcctgtacaaccccatggtctgtaatggcaatggccggatgtccccactcataagcacgtttcaccagagatttggcatccgtaaccccatccatatcgctcatctttgtatgacagtgaagctctactcttttctgtgggctggtatctactctggcagttgtaaaattggcaattttcttaatcccggctatggatgcaatagtcagttcactgtcaaaacggtctactgttgtcacaccgcgaaacttcagaaaagcccccttctttacatgttctgtcacttccggcacctgttcattgcgcaaaaacatcttcacaacaatactgtccgtaaagtctgtgatcgggaagataagaattgttttttcattacggatttctctggcttcaacctccataacctgtccgcggacgatcacctcacccatctcaccggtaatcgtctcaagtgcaacaggctctccttcgaaatctcttccatagataacatccggattgctgtcccttctgaatccaccccggaaatctcccttcctgttgtctttgcggtctgcaaatgcagcttttttgtccttcttttcctgctgtcccttatcagtctttttctctgctttcttctctgctgttcctgcttcttcagactgagccggctcttcattcttactgtttaatttcgcatgacggattacattttccacttcctgagcgatctgcactgctgcattcttacggtacttactttcctgcgtctccctgaactcaagttccacctttaagtccattccacatctttcgcagaaaaccttctgcagatattcgatcaggatcccgctcttttctctggctattacagaatcaggaaggatcatatgaagatcattttctccgggaaaagaaatctgcgcctgtctgaacatattgtattccagcatattgtagctgcgcagttccagttccatgctggatctgtaagtttccagaaagttctgaggattgtactgaccggaaaggcggaatttctcaataactgtaactgttacattcagtcctgcaaaaatctgtctctctatctgttcttccagttcaaagatatgcttcttatgaatccagcgttcactttttatatacacccatatatgagttctggaaggattgcaggacactctggtcacaaaaaccatgtccagcagttcttccagttctttcttcacttttaagctgggaaatacgtcaaaaaagtctttttccaaaataaaatctcctcgttgatctgacaggaagtcttcgttccaaatgttatttccagttcagaagttcttcccgcaacgtatccaaaagctgatcttccggaactttctttatgatctcaccatgtttgatcagaagtcccacaccaactccgcctgcaattccgatatctgcctcttttgcctctccgggtccgtttaccacacagcccataactgctactttaatatcaagcgggatatcctgcaccatggtttctaccttatttgcaagaccaatcagatcgatctgtgtgcgtccacaggttggacatgacacaacttctatgccacctttgcgaagccccagagttttcaggatacgttttgcggatttaatctcttctaaaggtgctcctgtaagagagacacgaatggtatcaccgattccctgattcaggatgatccccagtccgatagcagatttaatgtttccggaataaagagttccggcttctgtgattcctacatgaagtggataattcgtcttctccgcgatcagttcatgagcctttgcacacataaggacatccgaagatttgatgctgatcaccagattgtcatatcccaggttttcgatgatatgaactttatccaacgcactctccaccagtccctctgcagtaactccatgatatttctccacaagttctttctcaagagaaccactgtttacaccaacacgaatgggtattcctcgctcctttgccacatcaaccactgctttgattcgctctgtactgccgatatttccgggattgatccggatcttatctgcaccgttttccatggctgcaatggcaagacgataatcaaaatgaatatctgccacaagtggtatatggatctgttttttgatttccttcagtgcttttgcagcttccatagtcggtactgcacaacggataatatcacagccagcctgctccagtgccaggatctgagctactgtctgttctacatcttcagtttttgtatttgtcatggactggattaaaatcgggttgccgccgccaatctttctgtctccgatctgaatcacttttgtatgatctctgtacataattttcctcttctctcatttggtatcaaacagatattcacaatccgctttacagtttgattaatttacgtgtactgctgaacagctatctgatttccagaagttttctcttcagttcttcttccatgcggtgcatttccatctctgctgcctgtctcttctgacggccttccatctggatccgcatcacatcatccagagtctggatcaaatctgcatttgtcttctggagtgtttcaaggtcaactattccacgctctgattccttcgctgtctcaaccgttgccatatgaagtgtctctgcattctttctgagaagttcattggtaatatctgttacctgtctctgtgcctgtaccgcttctgcagagtgagcaattcccagagcaagcaccatctgacttttccataatggaattgtgtttacgatcgttgtctgtattttctcaaccattaccgtatcattattctggatcagccggatctgaggcgctgtctgcatggcaatcgtacgggtaagttccagatcatgcagtttcttttcaaatctgctgcatttctcatccaggtctctggctgcctgcgcgtcttcgggaagcccgctcagagctgccttatttttcatttctgcaagctttccgtttctggtttcttccagtttcttttttccggcaaggatatacatggtaagttctttaaaataattcaggttctgttcatacatcttgtccagcatagcagaatctttcataaggcgcacctgatgttgctgaagagaatctgtgatcttctccacattgacttgtgctttgtcatatttgtttttcagattttcaatcttagaagtctgctttctgaaaaatccaaagaattttccctcctcctgtacatcaaaatctttcagttctcccacaacattactgatcagttctccaatctcaccgagatcctgtgtctttacattctcaagagctgtatcagaaaagtccgccatttttttctgagttcctgcaccatactgaagaatctgattagtattctcaatatcaatctttgcagcaaaatcatttaccattttctgttcttccggtgtcagtacaggcacttcttccttctgtgtctgctttttggggagcacttcttctttcttttcaaactctccaagatccggctccagtgttaatgatggtgtttccatttcaaaatctttaaattcgtttcccatgtcctctgccgctcctttttatccttttttattttcagttctttttcatttttgcaaagtcatcatctgtcagaccttcctgtgcaagcagcgtatgaagcactgaaatatcacttgaaacatcccacgcagtatcctgaaagacagaatccagaagtttttcaaatgcctgattcagtgtatccagtgtatcctctatctcctttttggatgcctggatattctctccctgcacaggctgctgatccatttcttcatatgcatccagcagctttactgtcatgggcagataataattcatcagtttcttcagatccggaataatctccggatgcttctgcgcccgttcaaaaatcttctccacgatcagttccattctggatatttttgcagaaatctcctctcccggaatcgcatcgttgctcctgtggatcttatccagaaattcatttcctttattcagcacttcctgtacttcgggcggtgtgttctttctgtttctctcctgttcagcctgatgtttttcttcttcctgtttcttctgctcaagtgccttctgcgtctgcgtatattgcagataagtctcattactggtaatcagacaggtttcctgttcatcaatatgtccctgacggaaccatctgtcatcaatcatctttttaatatcttttttaacgaatttcaccggcttatttactgctgctgacaattgttcaaaattacagtatgtgtgatttcccagtgtatcaatatacttctgaaaacgttccagtttacccagttttttaatgccgcctgcgagaagtcccactcctgtcaaagctccgactgccataaaacaggttccaccggtcacaagagaactcatatgtcccaccgctccaaagatgctgaggaccagagttcccagtcccattccactggcaaggattccacctgaaacagcaatcatcatacctttcattcttcccccggtgttcctttcataaagagtcagcatcttctcttttgctttctccttctcaattctctgacgttcctgctcctgttcacgctcccgcctgcgcttttcttcaaattcttttgttttattgcggtataccccggaatcaccggactgactgtttccggttccaaatacattattcagaccatttttgattgcctcgcttccggaatctacagcagaatttactgcgctgttaacagtctgtcccaccgtctgcttaatatcctcggtcatctggcggtaatctttagtagaaactgctgtgtctatgatcttttttattttgtctccaagttctcctaattcatcaaaattctcgctcatattttcctccattttctattccatattatagcgaaatcctctataaaaaacaagactgccggattttttgttactgtatgtgaacagtaacgatttttcaatttttcattaaaattggaaatttcccattgaacttagcagacaaaagttttacaatggtaaagagataaacagtaatcacacttgtaaatactgtaaatatgtgtgaacggaggaaagattcattatggaaaaaaagaatatcgactggagcagcttaggcttcggttacgtacagaccgattatcgttatgtatctaaattcaaagacggcgcatgggatgccggagaactgacaacagatcctaatgtaacactgaacgaatgtgcaggtgttttccagtatgcgcagacagttttcgaaggaatgaaggcttacactacagaagacggacatatcgttactttccgtcctgacttaaatgcagaacgtatggcaaactcagcaaagagacttgagatgcctgtattcccggaagaccgttttgttgatgcaattgttcagactgtaaaagctaacgcagcatatgttccgccatacggttcaggcgcaactttatatgttcgtccatatatgatgggtactaacccggttatcggtgtaaaacctgctgatgagtatatgttccgtgtattcactacacctgtaggaccatacttcaaaggtggtgctaaaccaattacaatccgcgtcagtgatttcgatcgcgctgcacctcatggaacaggccatatcaaagcaggtcttaactatgcaatgagcttacatgcaatcgtagatgctcacaagaacggattcgatgagaacatgtatcttgatgcagctacacgtacaaaagtagaagaaacaggtggtgctaactttatcttcgttactaaagatggtaaagttgtaacaccaaagtccgatagtatccttccttctatcacacgccgttccttaatctatgttgctaaggaatatcttggattagaggcagaagaaagagaagtatacttcgacgaagtaaaagatttcgctgaatgtggtctctgcggtactgctgcagttatctctcctgttggaaagatcgttgatcatggcaaagaaatctgcttcccaagcggaatggagaaaatgggtccggttatccagaaactctatgatacattaacaggaatccagatgggacgtatccaggctcctgaaggatggttaaaggttatcgaataattttttctgtaaatagcaaatcctgcagaacaccgtttcttgtttctgcaggattttttgtttaaacatttctgtaactattcagcagtctactatcccgattttctttttctgtcttatttctttctctcatacttcacaaactggtattccaggtcaaaatatgtctgctcatcgctctctgccgtaatctcccattcatcatcttcatccagattcgggaagtggctgtctgcttcgtaagcgaagtcaatctttgtaacgtgtgccacatcacagtatgggagcatctgttcataaatgctgtcaccgccaatacagtaaacatcttctgtcggatatttctttatttcttccagtgcctcttcaatgctgtgtactacgatcgcaccttttgcgtcataatctttattttttgtgattacaatgttagttctgtttttcagaggcaggccatttggaaaactttccagcgtttttctgcccattacaactacttttccacttgtttcttcacgaaacattttcatatctgccggaatacttaccagaagcttgttgtccttgccaattccccagttctgatctgctgctacaataacattcattataaattttcctctcttacttgttttctatagtttcgttcttttaaaggtatttgctccagtactgtaagctatctaataaataaaactactatctctttgtatttcataaatcagcaacaaaattaaatagccactggaatattcttaatctgcggccatgtctcatagttctctacaatcagatcatccgttgtaaactgatagaagtctttcacttccgggttgagcttcacaaccggtgccggataaggttttctcttgatcatttcttttaccacaggaatgtgacggtcatagatatggcagtcagcaactacatgaagcagctctccagcttccatatcacatacctgtgcgatcatcataagcagaattgcatactggcagacattccagttatttgctgtaagaatatcctgtgaacgctgattgaggattgcattcaatgtcagtttctcatttcccggtgtctgcgttacattgaacgtcatagaatatgcacatggatacaggttcatctcatgcagatcctgatgcacataaatatttgtcatgatcctacggctgaatggattgtttttcagatcatagatgactctgtctacctgatccatcatgccttctttatactgatgtttcactccaagctgatatccgtatgctttaccgatagaaccgttttcatctgcccagctatcccagatatgactgtgaagctcatggatgttattggatttcttctgccagatccagagaatctcatccatagcactctttaatgcagtacgtctaagcgtcatggccggaaattcttttcgaaggtcatatctgtttaccacaccaaatttcttaattgtgtaggcaggtgttccgtcctcccacaccgggcggaccttctctccttctgtgctcgtaccattctccaggatatcctggcacatttttataaatacatcatctgcgtaactcattattttctactctctcgctttcttattttttatattcttctattatacaagtatgttcccttgttttcttattatagttgatacctaccatcaaaagattacctttatattcttccagactcgcgcaatattccttattttttatctgtgaaattgcaccctctgcacttttattccactttaactccacaaccattgctggtttatccggaaatttttttcttggaataaatacaatatctgcaaatcctttcccaccagccagttctctgtgcattgtataaaaattttgggccgcatagagtgccagtgaaatcgtatagcttaatgcattttcatcattatattgaagatgcgatgtctcaaaatgagcctcttttatcccttgtgcaacctgctttggtctcatttgccagattgcctttaaggtgtccgctgaatttttcagtgcttttgatacttcaccccagtcagcaaccgaaactgtattaacatattcgtcacgtatttctgcatttggaattgacacacaccgattttcataatcatatgacagatatcccaaatgcaccaataatgtaagaacatcatcttcatttctgaacgttgtcatatcatttgtaaagcttcccgtattcaccggaatgctttcacctgcaatcatgcttaacacatcatccttcaaaccttcaaaattcatttctatgtaaactttcaaagcttcaaaggtctctgtctgattccagtaatttccaatctcacccagtctcatgctgctcacaacagaacgcggactatatacagaggcaactcccttaaatgaatagccatcataccagtttttaatctcttccatatccatctgatactttgcgcacaatgtctgaacttcatcctcagtaaatcccacatactcacccagaggtcctggattcaacatagaaaattcatcaaacatattcaaagcagaatgtgttccgtacttcttaacaggaagaatacctgtcatataagccagatggatatagcctttatcctttagtaaatcccgtaaaaagtcaagatatttctcctgtgcttctttatcctgcttatactcacgaaaaatacaatcccattcatcaataataatcacaaaaggacatctgctgtaagcatagacatcctgcatagattcaatcaagtcattttcatcaaaaaaatccacgtccggataagcacttctcagctctcgcaatacaattttcctgactcgttccattagctcctgaatattattactacgactcaaaaaatcctgcatattcaaaaaaatcgtatcatatttattgagatatttttcaaaatctgtgtcttttgcaattttaagattagaaaataactcttttgaatcgccccctttactgtaatatgctgtcagcatatttgcagccatagactttccgaaacgtcttggtctgctgacacatatgttcttctgtaaagtgtgtaaaacagaatttgtataccgtatcaaacccgtcttatccacataaatatcagaattgagtgcttcctgaaatttggagttatccggattcaaataatttcccatttaatccccctctttttcatgcaacagccacagtctcttctccagacatctgaattctacccttgttacatctccgcaatattctccatctgcatgaagaaccatcggtttatcaagcagcactctgaacccgttttcttccctgatattaaatccattgattctctcctgtttcgccgccaccagaaatggaagaaggaaaaatgtctgccatttggcaatacctgaagcgctactcaaagacagtctgccatcctccggtgaagcttccggtgccatcgggacaccaccaccttctgccggcagattcatggcagctgcgaagatcattttcggcaggataaatccaccatgttccgttatcacttttgcatttgcagtttccattgtaaaaagtgactggaccgttaatgcaagatatgtaagttttcccagatgaaagcggtttaaaacctgtttcagtctggaatgcaaagctttcttacacaccagtgcatccagtccaagtcctgcactgatgccaaaaattctcggcttttcacacccttcccagcttacctgaccaagatctatcctgtaaagttcttctccccgctggtcttttctgatactggcgcagatttgtttcaggctttctttcggtgtttttggcaattttaagtttctgccaaaatcatttcccgaacctgtcggaattactccaagccgtactctgtcaaaatctgtaattccattcagaacctcgttgagcgttccatcgccgccaactacgatcagataaataggatcatcacccttcatggaagaaatcttctctgccagcttcgtcgcatgtccctgatatctggttgtatgcgccacatattttattttatacccgcgaagcagacactgtgtctcattccatacccggtgcgcctgccctgttcccgctccgttatttacaataatctgtattcttctcatttttcctcacaattatatctgttttcactgcccaaaatattctttatccagatactctctggaaacgctatagtatctatactatacaatatttggcttccacatacaagagcacagccaaccaaaatccttgtgatcgtcacatatttattactgttttctattctatagcaatttccaggcaagaagtcaaaataatatacaaatccgtcaaaatattgaaagcatttttctcaaaaagtatttataatgtaggtagaatatgttgtggtgcaatttcagcaccacagcagtcaataaaacttaaacataaaaacttataaaataaatcatttcaggaggtttttacaatggaaaaaagatggtggaaagaaagcgtcgtatatcagatttatcctcgcagcttctgcgacagcaacggagatggtatcggtgatctgaacggtatcacaagcaaacttgactacttaaaagagcttggtgttgatgttatctggctctctcctgtttacaaatcaccgaatgatgataacggatacgatatcagtgattatcaggatatcatggacgaattcggaacaatggaagacttcgaccgtatgctcgctacagctcacgaaaaaggcatcaaaattatgatggaccttgttgtaaaccatacttctgacgagcacaaatggtttatcgagagccgtaaatccacagacaatccatacagagattactatatctggcgtcctgcaaaagaagacggcagccttccgaacaactggggctcctgcttctccggtcctgcatgggaatatgataaaacaacagatatgtatttcctgcatctgttctctaaaaaacagccagacctcaactgggacaacccggtcgtacgtcaggaagttttcgacatgatgaactggtggctggaaaaaggtgttgatggattccgtatggacgttatcagcctgatctccaaagagcagccggaactcccggacaaagaacctggaatcaacggatatgcaacatttaatgtatctgcaaacggtcctcatgtacatgaataccttcaggaaatgcgtcagaaagcattaaacaatgcagataccatcacagtaggtgaatgctccggtgttactctcgaagaagcaaagaaatacgcaagaagcgacgaaaaagaactgaacatggtattccagtttgaacatatggatgttgacagcgatgaaaaagccggcaaatggacaaccagaaaaatggatcttcgtgacctcaaaaaaattcttacccgctggcagaaaggtctccaggacattgcatggaacagcctttactgggagaaccacgaccagccaagaagcgtttcccgtttcggtaacgacagcgatgaatacagagaaatctctgcaaaaatgcttgcaacctgtattcatatgatgcagggtactccttacgtatatcagggtgaagagcttggtatgacaaactgcccgttcaacactctcgaaaacttccgcgacctcgaaagtatcaatgctttccacgaattaacggaacagggcaaaatgaccgaggaagaaatgatggcagcgatcggctacaaaggtcgtgacaatgccagaactccaatgcagtgggatgacagtgccaacgcaggattctccggtgccgatgctacaccatggatcatggtgaacccgaactacactaagattaatgcaaaagaccaggtaagccgcgaggattccgtatttaaatattatcagaaactgatcaaacttcgtcacgaaagtgatctgatcgtttacggtacctatgatctgattcttgatgacgataaagatatttacgcttacatccgtacactcggagatgaaaaactcatcgtatattgcaacttcagtgaaaatacccgcgaagtagaacttccggaagaattcacagacggaaagattctgatttccaactacaacgatgctaaagtaagcgaaaagattaccctcagaccttatgaggcaatcgtaatccagaaataataaatgattttgcttcttatgaatcacagtaattcccagattactgtaattttctgaagaatcagtgactgtgaaaaatactgaacagttaccggaaatatattttctcatatacaacctcagaaggatgctgccagattattctggcggcattcttctattttatccccaaggcttatgagcaacagtgacaatttttttgcatttatttcaagtttttttgtgcaatacttgcgtttttgtatatcattgtgctaaaatatccacataacaggatataagatttcaaatacttttgcattttcactcttatatctacagacttttttacatcggggtgtttcaaatgattacaatcaaagaaatggcagaaatgctgggaatcagtaccacaacggtatctaacgtcattaacggaaaaaccagcgaagtctctcagaaaactgccgaaaaagtccagaagcttctggatgaatatgactatgtacctaatatgagtgcaaagaaccttgcgcagaatcattccagactgattggaattgtcctaaaaggacgcaaagacaaatacgaaaatatttttgcagatccatttcacggagaattgcttggtgccctggaggcagcgatccgcgaacatggatattatatgatgctttatacatccgaagacatcaacgaaatcgtccgcaatgtagtaagctggaacaccgagggactgattcttatcggtatgctccatgatgactacctgcgaatcaagagtaaatataagaatcctgttgtcctcatcgacagttatacgccaaaaaatattgccaaatatgtaaatatcggtcttgatgatgagcagggtggatatctgatgactaaatatcttctggagtgcggtcaccggaagattgctttccttgctgataatatggaaggtgtagattatgtccgttataccggtcatcaacgtgctcttcaggaatataacatagatgtagatctcgacaatcttatcgtaatccgtccatctaaatatgaacgtcagggaagtatggaagagatttacgctgtcgcacacaaattcactgcatttatgtgctgctcagattattatgcagtcacattgatgaaatatctccgcgaaaggggcatccgttttccggaagacctctctatcacgggattcgatgacaatctgtatgcacaggtagtctctcctccccttacgacaattcaccagaatatctctcagcgtggaactatggctgtcgagtatctgctcagaatgattgacggatgggtcccaaagtctactagtattacacttccggtcaaacttgttgtacgtgacagtgttaaaattctgaattccgataaacaggattaattcatcgcataactatacataaaaagaacgaaactctttcaaaatgcttttctggattttcgttcttttttctctatatctatgtaccaaacaagaatcaattaactgctacattagattccaaaaacaaaaacaaagagcatagattgctccatgctctccatcattctttcaattttatattgctttttgactatctcattttccttattacatttcaataacaaggaactgataacccttcaactcaatcttatttccatccatagctacatcatcatagttattgatcagaactttcttgcactctcctgcgagctcgattgtctgtggctctttctgatagttaccaactacgagaagagtcttgtcacctttacgatgatatgccatcaggttatgtacgtcttcccagacaggttccagagcaccatatacaacagtctctttatactctggattcttgcgcagtgcaatcagtttcttatagaagcttcttacagaattcggatcattgatctggctctctgcattgatctttttgtagtttgcatttacgccaagccaaggtgtacctgttgtaaatcctgcattttctttatcattccactgcattggagttctggcattatcgcggctgaatctggaaacagctttcagcgcttcctcaggtgtacatcctgcttccagagctaccttgtactcatccagactggaaatatcatctacctgatcaatagattcaaacttcacattctccataccaagttcctgtccctgatagataaacggaagtccgcgaagcataaagttcagaccgccaagcattttcttacttgcgtcacagcagtcaccttccgggatatatctgctgacaccacgaggctcgtcatgattttcaataatattggaaacaaatccgatatcaccaatttttctctgtgttgtaaagcaacatttcttgtaggcatccggagtaatctgtttgcagtcataccatcccttgtcagatgccccccagatagtctcttcgaagtcaaacatactggagaaatatccattatcgccgatgaaatccggaatctcttcatccttctcatcgaaaacttcaccgacagagaatgcatcgtatttcttaaatgtacggtctctcatctcgccaaggaagtcgccgattcccttcgcttctttcagcatcttcctgatactgcaaagaccgtcttcacgatccggctcataatcatgcatcggaagtgctttcttgatattgataatcgcatcaatacggaatccaccaagacctttatccagccaccagttgatattcttataaacttcttcccttacttccgggttctcccagttcagatcgggctgtttcttatggaaaacatgcagatactgtttatttgttcctggaagatcttcccatacaggtccgccgaaataagaacgccagttagttggaagttctccttctttcttgtcacgcagatagaagaaattaccatatttaccatccggatcctcacatgcttttttaaaccattcatgttcatcagaacagtggtttacaacaagatccatcagaatgtacatatctctcttcttagcctcagcaatcagttcatccatatctgccatggttccgaagcgaggatcaatatcataataatctgaaatatcatatccctgatcagccaacggagagcggtagcagggggaaagccagataatatcaactcccagatctttcagatagtcaagcttctcaataacacctctcagatctccaattccatctccattggtatcataaaaactcttcgggtaaatctgataagcaaccttttcattccaccatttctttaccattgtaaaaatcctcctgtgttttttattaaccggcgctattgtctgctttgtctccagtattatacctcttacctttaacgcctaaggtctctttttcatttacggcaattatatcagaatccaaggcttctgtcttatctttttttgataaaaaaatacaaaattttgacttttttatattaccgatattcttatttactgtgtttcttttaatgaatgtctgcggtactgcagtggtgttgttgacgtatatttcctgaactctctcaggaaatttcccagattattatatccgcattccagacagatttccgtaactgtaaggtcagactccttcagataatgaatagccttttttatcctgtactcattcacatattccataggcgaacgcccgatcaccttcttgaaaaatctgcagaaatattgctcattcatcccgatcagtcctgcaaggtcacgtatatagattttctctttgtaattctcctgtatgtaagtcagtgttgtcttgatcgtctcaattctgtggtcatgattcttctccgttacctcaaacagattattcgcagacagaactgccagaatccgaagcagcgctgatttgataaacaactgtcgggtgatatcatccgtaaccgcctcgccgtcataataattctcccgaaaagaatctccgccaaatacattacggatttcttcataagattttcttaccggttcaaatgccggttcattctttcgcagacatctcggaaactggatactgccattttgtaccggctggatcagattcgtctgaatctgatccaaagcatatgcagagcttagcatatccatatgaaaaaccaccgcattttccacacagccgccgtttttttcaacagaaatactgtgaagttccccgggattaataaaataaaaacattcctctgaaatgttgaaacgttccatatttacttccagacagaactctccacccgaaaaataaagcagttctacttcttcatgccagtggtgtttcaccatattcccttttatccttgttcctgtctgatagaacgcacagggaaagtcctgtgtaccatggacgcgtatttcctttaaagttgatggttgttgattctgcatgaagctgcctcctgttgtcattgttattgttattataaatccggcatcaaaaatccgcaactaaaaaggacatccgaagatgcctttttaatagtaagtatttatacaattttgtgcctgctcaaagaaactgtcctcttcacattgcccaagaacatatccctgaaacagttttcccatatctgagacagcacccatggaattttcacataacggacgtgcattcaatgtatattcccggagatatttccgtatcatatctattccttccagatcaatatcctcattttcgatcacatccactctggcaggataacttttcattatttttgcatattcagtactgccttcataaccggctgcatactgaagaaatctgacagctgcatctttattttctgaagcattgttcaaaacatactgccaggttgcaatattagtggcttttttcttatgaagcacgggaagcggtgccatatgtattttatttttcccatatacatcagcatcaagaaatgtacccagagcactcgtatacataaaaacacatccatattttcccctgataaatttctcttccatctgttcatactgatctacaaactgtgcaggcgatgtatttttctcatccagcatacttttcatatatctggctgcatctttggttttcggatcagtccagtcgaaataatcgccaccccagaaattcacaaattgcgaaagactgttataaacatgtgtattttcccatgcatctccataagcgtactgatccggatttttcaaactcttctgcagaatatcaaaatcaccggtattctttatctcatcgagtcctgcctgtttcagcaactcctgatttacccagaacatcataatatccatctgaaaagggacagaatatatatgtccattctcttcacaaatgctttccagatacttctgcggaaagctgtctcttacttcttctgtcataacgtttttttccagtggttccagatatcccttatgcttaaactcagaaatcatctcatcattcacggaaatcaaatcaatatttttgtcccccgaagccaggatcgtggatatttttgcctgccgattatccgcattggacggacatttttccacagtgatttccatatcaagttttttttctgtttcctcgataaaatcctgaaatcttttattatctgcatcaatatgcatgattgtcagcttttgtttgtcttcgtgaaacgacgatgaggggagcttagataagctccccgtatctccacatcctgtaataagcaaacatactgcagttatgaaaattacaacactttttttcaagcatttcacctctgttttttatcttggccatctgtcctcttttgacatcaatggtgcaaacggtgcatgtgggtgtgtctgataccagtaagccacgcttgccacatcatcctgacgttcaaataatcctctgtaacctactccaatctgctgaatggtcacacgcagatcctcatcaaaacaaatcggatcctgaatatgccagcgatagaaacctctcatcggcggacagtcatcattatgatagaaattatggatcagctcatcatgagcagaatagtatgggtagcccagatatggtgtattataattttgttccacagtctttccgtccacctgctttgcaaaactccaggagcctccaaaataatcttctgttccggttccgcagattgtgggatattcatcatcaccgtcaatatagaatttcatttcaccttcgccccaccagtaacgttccagtgtggtaagtgcaatataagttcctacataatgaccttttccttttactccgtcaaggattgtataatctttctgcttctctgtcagtcgctctcgcctccactgtgcatggaaataagtaatatcatccggaagctcatcatacagacagtaatctacctgatagaaaaatgccggaattttatttgcatgctgattttccagagtaatttttgcttttttcttaaacggcatcgggaagtaacagttaaatcctctgcttggcaccactgccattgggacagaatttacaatacactctcttccaaaaccacagcaaaagaaatctccgagaggactttccacagatggtgtttcctcatcatcccagtacatacggatgaccagatctctcaatacaaaacaatctgcatcggttgtcttattatccactgtgatccagatatgattgatctcaccaggaccttccatctctgcaagagttacagttgcacctggctcaatatcattcaggcagggacttccttttctggacggtcccagatggctcgctgccattccacctttacctttttctccatgtggattctctgcattgattgcacggcttcttccatgttttgccagagcaattccaccaagtccacctttaaatgactgatacataatgttttcctccaatattcttagcattcagataatcaggcttttactcctcctgccattataccatccatgatctgtttttcaaagactgcaacaaaaataataatcggtaaaagaataatccatcccattgcacttaccagatcccacggaactccatacatgttgtcacgcagtggaagctgtacaatggaaacggaaagaacctgaataccatttgaataaaacaacggtgtgaagaagttattcaggcaggtaataaagttgataatacatacagttgcgattgcaggtttcataagaggcaatacgattgtaaaaagtctctgtgaaaaagttgcaccgtcaatcgctgctgcctcttccagtgaaatagggatttcccccacaaagtttctcagaatcagaaccgtaaatgggataacagtactgatataaagcaaaatcagtccgggatatgtatcatataattttactttctgcatgaactcatataatggtcttgctgtaacaacttcaggaattaacatagttgcaataataaatgcaaaagcaatattgattccttttgtagtgaaacgtgagaatccgtatgcagccattgcacagagtacagtactgataaccagtgtaagacctacgatcaatactgtatttcccacttttgataaaagtcctacgttctcgatcagaaacttatagctttccagtgtcggatgatccggcagataatcaatcggtgttttgaataattctccggaaggtgtaatagaggaaataaaaatccagtataccggaaacaggataataaatgagacaattgcaaacagtacccatcttccacctgccattacaccatgatatatgttatattttcttgaatcttttttcatggtatttcctcctttagttatcaatcttgttcataacacgtatattcagccagctgaatactgccattacaacaaacagtaacattgccagtgcagatgcataaccgacattcagatttgtaaacgcctctgtcgtgattctgtatgcgatcagtgccgtatcttctccaggaccacctgaagtcatagaatatacaatatcaaaggttgtcagtctccataaagtaaatggaatagataaagtcagtacatttttcagtatcaacggtaatgtaattctgaagaaacactggattccatttgcaccgtctacttttgcggcttcatagatatcacccgaaataaactgcagaccggataatacaagaatcgcaaagaacggaagatctttccacagatccacggcaattacagcagctcttgcagatcctgtattgatcagccagctattctggtatccatggacaaacaatctgataaagtcattgatcagaccataatcattattaaatgcccattttgcagccatacctacaacaactgccggcattgcccagggaatcagtacaatcgtacgaagaaaacgacgtcccttaaatttcatatttaatatcagagcaagacctacgcctaatattacatggaatatcattgatactactacaaaaatcactgtaaaacgtatagatgtaagcactttgggatctgaaaaaattttcaggtaattctgaattccacagaattcattaattccggacagaattttaatatcaaaaaaactatttctaactgtcattaaaatcggatacaaagtcgtaaatccacgaataataaccacaggtaacaccaacagccacggaatccatttcattgattttttactgattgtcacaggtactccctccttcatatctttaagcacaggtataaagcagatttttctgctttataccttcatttattatgtcagtttttatgtgtcagtatttcaaaagactttaaacgaataccgtttttactgatatgtatcaacgacttcctgtgcttttttacagaactcatctactgtgatctcatctttcatgcaggactggaagatagttcccatatcactgatgaactccattgtctgtgctaccagcggacgtccctgtacgttgcactcttctgcatactggctgtacatttcttttgcaggatcagtatccggaacaactttttctgcaacatcttttcttgcaggatatctgtcaaatgctttataggatgcttccattccaccttcatctgccatatactgcaggaatttaatggctgcatctttgtttttggatgcactgttcagcacatagttccaggaatctgtaaagattgctcgctctccattgccgctgaaatcaggtaccattgccatgtggatcttgtcagctcccagcatatctgcctttgcataatccgtacctaagccccacataaaccagcatccgtatttgccatcattgatttttggattcatctgatcatatttatctgcgatctgatcaacaggtgtttctttgttggcaaccagatcatgaaggaactgaattgcttctttattttcttcttttgtccagtcgaagtagtcaccgccaaacatatttacaaactgtgcaatttcattagatgcatatgtcttttcccaggaaccgccgtatccgaaacgtccatcttttgaaactgcttccatgtatttcatgaaatcttcttttgtatcaatggattcgattcccacctcatccataatttcctgatttacccaaaatgcaagatatcctgtatatcccggaactcctacaatatttccatccttatctgtgatcatatcctgaatatacccctgcgcaaactgatcaatgatatcatctgtcataaccgtgtcattcagaccttccagccatccggaattcttgaatgcagcactcatttcatcgttgatttcgacaatgtctacggaagaatctcctgtagaaagaatcgttgtaatcttctgctgacgtgtgtctgtatctgtcggagctgcaataacattgatatttaaacccgttgcctcctctacatttgcaagccagtcatcaaaatccgggtcagtagtgttaacgctgtataaagtaagatcatatttctcctctgctgatacacttacaacattccccatcattcctgccaccattgttgcagctaaaactgcacttaacacttttttcctcatattctctccttttccgaacagttatctcgcatcaactgttctgtgttatttggtaattaaagaataacaaaaacactctttttactaaatacaatttcttttgattgatttatattatttttcgttctattgtttttttcattctgattttttataatacagatagcagatgaacactgtgttgcatctttacagaattgctgtataatatggcaatcttcaaaaagatacctgataaaatcaaacctattcatataaggagtattatgtgtaatgaaactcaacttgaaaaaaataaattatcataaatggattccttccagattttcctcatttcaggcaaaactcctgattgcctttctggttgcaaccctgcttcctctgacacttgttgcactggtcagttaccatgtttcctataatcttgccagagaccgaatcacaaactctgcattgatgtctgatgaacagcttatttttcagcttaacagccgtctgaaccagaccgaaaacgttgctgacaccatccagtatcagatgtacgcttttgaacactcttccccagatcaggttggcaccatgcaggcattaacatccatgagaagcaatatttcattatataaatctacatttgatttctttcatatatatgtttttttaaaaccggaacaaaccggagctgatgagggtatatatttcttttccacagataaacttttcaattatggaatcagcgaatctgaattacattccataggttcttcttccctgtggctgttaaagaaaaataccaccttacccagagttatatctgcttccaaaagaagcgcaaatacactgctgtgttttcgtgctcttcaggacaaatccagcaatgttctcgaatatgcttattgtattgcacttgactgcgatgaattttcccggtatcttcagacttctgcttctgataccgcaatttccagttacattctgacaccacagggacaaattgcagctcacagtgattcttcccgtaatcagacctggatttcagattcaataaaacagatgtttctggaaaataccaattccttctttaaagacaatgacatctactataactgccgcactctggataacggttggctgcatattacggaaatcccggaaaactatatcaaaagcaatacacaagtactgatcaaaacactgttgatcactgtaattatttctctgccgctgactatttttattgtaatccttttttccaggaaactgacaagcagaattgccgcactgtcctatgccatggaatcctttcatctcggacatgatccggagcacctttccatcatcacactcccgcatccggccgatgcttccaattatgatgaaatagacaatctggggattacctttgaagatatgcagcacacaattgcccagaatctgaaatcaattgtcagtctctccattaatgaagaacggctgaaatatcagttattacaatcacagatcaatccacattttctctacaatatccttggaaccatccgaacctgccaggcacttggcaaattggatattgcagatcagatgctgacaaatctgactgccttttaccgactgacgctgagaaaatcaaaagaactgataccgatcaaagacgaactggaaattgcccgcctgtatctggaaatggagaaactctgccataaagataatcttaactgggagatcaatgccgaagacggaatagaaaatttcacgatctgcaaatttacattacagccattcctggagaattctatcctgcacggtctttcagccgatacacctgaagtttttatttccattcaggtactctacggtgatgataccgtagtgatatccattgaagacaatggagccggaatgtctccggagacactggaacagctccgatatgccatagacaacaaagtcataaattacgaaaaacattttggaatttcaaatgtaagcgcccgcatttccaatcctttgtacggtaacggctctgtgcgtattgacagccatcccggaaacggtacctatgtcacaattgaatttcaacaaatggaggatacagatgaggaaaataatgattgtagatgacaattatctgtcagcagaaggaattgaaaagaacatagactgggaagttctgaacgcagaaatcgtacatatctgctacaacggaacctctgcgatagacgctatgaaaaaagaacctgtagatttgatcatctcagatattgaaatgccggatctggacggaatttcaatgagcaggcaagcactggatattaatccaatggtaaaaatcatactgatcagtgcctatgataaatttgaatatgcaagacgcgctctgcttcttggtgcattggattatattgaaaaacctctggattacgcatatctgatccagaaagtaaaaaatgcttttgccctgatggaacgtgagcagaaaaatctgcagttgcttaaacagagcaggcctttgcttatcgaaaaatttttccgtgatatcactcaccgttccaggcaggaggcttcctatcgtctcaaaccttatctgaactacctgaaccttaaactggattatgatttttataacgtagtgattcttgaactggaaaatgcacagtctctcagggattcctatggcattgagaaatttcagatggaactgctgaatcttcgtgatctgatcacagaacaaacctcagaattaaattatatttatcccctgcaggatattgatggttatctgtgtgtgatcggacaaagcggctgccagtccggaaattttcgccagcttacctataaaatcatttctgcacttgtagataactgcaattcacagggactggttctgaatgccggaatcggtgccattgtacaggatctgtgggatctgaaccgttcttatgaaagtgcagttcatgcactggattatcgtttctttttcccacaccagaacgtatttgacggacgtgaggctcttggacatgacttatctgccactgatttctccgattccagagaggaggaattaatccgccttctgtgtaaaaaggatgtttctgcaattgactcctggtttcaggatttctccagatggcttactgagaacttccgcaccaaaagtttcgcatttatccagatctactctctgcttggaaggattctgaagtttttctatgaactaaacctggatacccatgatctggaagcaaagatcctgtatgtatacaatcatctggaagaatttcataccacagaagaactatgcggctggctcaacgaactctgccgccttctctgccggaaactggattcttctctgaatgattatcaccagaaattatgcgaatctgtaacttcatatattgacgaaaactatgccagcaatactctgtgcctgaacgatatcgccagcgaagccaatgtcagcccggcttatctgagtgccctctttaaaaagaaacagggcgtgagtatcagtgactatatcactactcagcgaatcaacgccgcctgccgttatcttacagccacaaacatgactctgaaggaaatcagtatgaaatgcggttacgccaatcaatattatttcagcacaagcttcaagaaaaaaatgaatgtcactccatctgcatacagagatactcagacgtcaaaatcttagcttttacttgtgtttccctataactccctgtataataaaaaacaatgtctattatcatgacatcttttttatatgagtgcgcagtcaattaccttttaccgctactacatctgttttgcggaaaacctgtcagtggcagttgtggtaaatgccaatatacttattataaggagatttaaaatgggggtaactgaaaaaacagcaattcttgttatcagcttcggtacaagttatgaagaaacacgaaagaaaacaattgaacagattgaatctgacctgcatcatgcatttggggaatatccgttataccgtgcatggacaagtccccgtatccgcgccaaactccggaagcgggacggaatccacattatggatattgatgaggcaatgacccggctgaaagcggacggaattcgaaatgtaattgtacagccaacctatgtgatcaccggatttgagagtgatgctatgaaagaaaaagttcttgcacataaaaaggattttgattctgtcattatctgtgattctctgatggttacaaagcaggacaaagaagaggtctgtcaggctatggcacaggaatatcaccctgattctgatgaaattctcttatttatgggacatggaacagagcatgttgccaatgaactttatcctgagatggacgaactgtttaagcatttcggctattccaatatgcatatgggaacggttgaaggggatttctccattgaaagctttctggataaattaaaaaatctgcatccgactcatgttcatctggcaccttttatgatcgtcgcaggtgatcatgctaccaatgatatgtccggagaggacgatgattcctggaaaagtattctggaaaaagagggatattctgtcaaatgtactctgaaaggtcttggcgagatccaggcggtcagagatatttttatccgccataccagagccggactggacagactttcagaaatccaggcttaaacacagcaggaaatcgagagtatattcaaaccaaaaagttagtgttcacaacaacacgcttcgcgggatattaccagtgaacaataacgtcaaaaggagcataccacattaagttcttattaatgtggcagctcctttttgtctttccttttttgaatatgtatttttcctgattatttaatgacttctttttttcttctttttattaggattattcagtacagaccagcagaatgcctgaacaagaagtattccgataaacgcccctatactgtcgattcccacatcctttaccgccggtgtacgggcatccacaaaagactgatgatactcatccagccctgcaaatcccacacagacaattcccgcaagaagcatcagccagattcctctcacaccatagacatataaaggaaaagaaatagcgatagccagcagaaaatactctgtcatatgtgccgcttttctcacatagtagtgaattccatctgccttataagcaatctcttcactgctcagattctctgacaaaagctcgctcttcgtttctatgatctcataacttattttatagctcagattacctgaaacttcacccggctgggctgagaacgaaaaaatgatatacatcatcagcagtgccggtaaaaaagacaacggtttcagcaatgtgatcaatattttcattctttctcgttttccccgtcttcctcttcgtcttccagattcttaaccatattagccctttcagcaatgctcattgatctgttctgcccggatgcatcctcttttttcagttctccgcctgcggcagcttccattgccgcattcttcgccgcttttgctttcttgatcttctcttctgagagcatatttttaatgccgaaaaacagcagaccagcaccaatagctgcaaatgcaattccggcaagcataaatcccatactggttccttcttcgcctgtcacatatcccttacagagactgtaacttgtatacaacagatacactcccgccagactccagagtataaatcttccattggagactttctgttcttctgtatccggctcttctttcccgctctttgcaatttccggcgtatcttcctgctgaatctctgccgggctttgttccagcagttcttcgttttcgtttttctccataaaaacctcctcatatttataacttttattaggcgtttgcgaaacgccacaagccgcataaatacggcattttttgttacctataaacaaataactcctcaccggatatggtataatagagttgactaaaaactataaacctacatccaagaaaggagttattctgatacttatgataccatataaacagctttctttggcagatattttttcagattgccatgaaaaatttgaaaatgacaaacctgcttttctttctctattagaaacccatatcgatattgatgagttaattccgatttcttttagaaatcatttctatgcatcgacgggcagaacccgtaaataccctttgcaagcttttctgtgggctttgattattcaacgtattttctctatccctacggatcagcttctcctgacttttctcgcttactcaaaatcacttcgggaattctgtggttttactaaagtcccagacgcttccaaaatcacccgattcaaacaggattttttagatgacctccagcttgttttcgataaccttgttgatgttaccgagcctatctgtcaggcgattgactctgcaaaagcggatatgaccatctttgattcttccggcatagaagcatttgttaccgaaaataatcccaagtatgctaacaggatcatcaaacagcttaaggcatacgcgaaagctcagggctttgataaatcctatgatccttataaagctgcctatgattccatgccttctcatgcttctgctaatcctgagattaagcagctctatatcaatgggcatttttgctatgtcttcaagttcggcattgtcactaacggattgggcatcatccgccacatatctttttataacaaaaactttatggcttcacatcctgatatcgttgtcgaaaagaaatccgattcccctgacgaagataaatgtgttcatgattcaaagcttttaatccccacacttaaggacttcttttccaagcatcctttgattaatccaaaaaccttcctgggtgatgctgctttcgataccgcacaactctataagagccttcttaccggtgacacttttggtaatgacaaacatttctcgaaagcttatattccgctgaatgcaagatccggacttgaaaatctggattattccatcaatgaagatggtattccgtgttgtccccatgatccttctttacaaatgaagtacgaaggcacttccaaacttcacagtggagtaacaagatataaatttgtctgtccaagaatgaaatggatttatgataaatcaactcaaaaatcccatcgtcattgtttctgtgacaacccttgtacttcttctaaatgtgggcggatggtctacatctacccggaaaaggatcttcgtgcttatcccggaacgatccgcggcaccgaaaaatgggatgatacctataaaatcaggactgttgtcgaaagagatatcaaccacatcaaagacaatctctgtcttgcaggacgccgaacccaaaatgagaggactctgcatgctgatctgattcttgccgggatcacacaacttattactgttgttctcgcagataagatcaatcaccacgaatatattcgaagcataaaaccactcatagcttaggacttaccactttcataaagtccatagcttattaaagtgcgcctaacatgtgcgattatccatttttcattccacaagtcgtgctcttcgcgaattcttccttgttttggttcaaggttacgaacgagcaccgcgagtttcgcaattacctaataacttttataactggtgaacctcacatgactgaagtcacgtgcttccagacgctttaggcgtcagactgaatatcggcggatacgcctgtaacttaggtgcgcagttatgcgcatttcccatgccagatatggctggttcccacattacaggtagtccgctgtatatctgcctgtatctatgctgcttttaagaattccatttctgaatggagttttctcagatctgcatagacgcatgaggttctacgctttacaggagggacttttgcctccagcaaagacctttccgttaccggaaggggttttaaaagttctcttataaaatatctggctcctatattataggatgctgacaggtcacaattatatcgttttcctgtctggaaagtacagaggctgtaatcttcccagtcacgtgttaccgccccggaaccatcataagccagtctgctggtgttccatgcacagatccgggatacccgcatccttttcctgtgtgcctgatgttcacagcgtctttggatatcccgctttctccacaggtgcagtttctgctttttctttcccggtatcttcccctgcatctccagatactcgaacacgatcacatctgcatggttttcttccgcatatcttacgatcgcacctgcaatctttttacccagttctgtgttcagacgtttcgtatacgtccatcttccctgtgtctgcgcagaaccatgttccctctggaatctgcggatccgtcccagtgcgcggtacatccggtctttttcactgggatgatctatgaattttcttcccaggacagttccgtctgcccgcatgatggtacagactgcatcggtattgatccccaggtccacgctgcagatgacctgttctttcacaggtgttttggtaagtgttacttcttctgtataggtaaaacgcaggaaatatttatggtgtcttttctccagtgtcggggcagatgctttttttcctgaccagtattttctcagatattccatatccgtatgctccagacgtacacagaaccatttccagtcatggccgtcatagattttcaggtatgcttcgtctttcctttccgctccctcacggtacatgacatcacggtagaagaccggcatggcgtggttttcatatacaagctttggtttcccactctttccgtctgtcttttcccatagatccaaccgtgttttataagaggatactgtccccagtgcatgctggatggcagatctgcgcagataggaaggcatctttgggaaccggatatcaaaatcaaaacaggcatggtttttcttcgtagtatgtaccagatgttctgcagcattaaaacgcctctttgcatccgggatttctgctaatttttcccatacctgcacataaatcccaatcagataactgacagcagaacggtagatctccagtgtctggcggaccggaatattctgttttcgtaattctacaccataactggatattatctgcatttttatttctccctgataactcttttctcagattctgttgttttttctactacctatggctatattttagcacatatagtgccagaagtaaacatccgttctttcttttggtaaaaaatttgcgcgtctaactcatcactactacaatatatttatgggtaatccccttacttccagtaaggatttatccatctcattacttaaactgttagaatgtaggatgcaatggtatatcgacttcatcacttggacctcgcgtccgtactttagactgataaccggctcctcattcacagtgttcgttttatgcaggttgaatcacattaggtgcattcgtgtcacacacagtagtttgaacaggtaatgagtaaaactggtatttatccattgtaatattttttaaggagtgataaatttatgaacgcagtaggtatcgatgtttcaaaaggtaaaagtatggttacaattctgagaccatttggggagattgtatcctctccttttgagattaagcacacatccagtgatatccattcacttattaaacttattcattctatcgaaggtgaatcccgggttgtaatggaacataccggccgctactacgaggcacttgctcaccagctttcagcagcagatctctttgtcagtgctgttaatcccaagttggtcaaagattttaataatgattctcttcgcaaaatcaagtccgacaaagctgattctgtcaagattgcccgctacgctcttgacaaatggcaaagtcttgaaccgtatagtattacagatgaattacgtgctcagctaaaggtcatgaatcgtcagttccatttctatgtgaaacaaaaaacggctatgaaaaataatcttattggcctcattgaccagacctatccaaatgcaaatacttatttcaatagtcccacccgcagtgatggttcccagaaatgggttgattttgtctctacatactggcatgtagattgcattcgtaaaatgtctctaaacgcttttgttgaacattatcagaactggtgcaagcgcaaaaaatatgccttcaataaatcaaaagcggaagaaatttacaccaaaacaaaggaacttgttccagtatttcctaagaatgaaataaccaaacatatcatcagacaagctatcgatcagctcaacagtacttccgttactgtcgaaacaatacgcactctcatgaacgagactgcctcaaagcttcctgaatactcaattgtcatgcagtttaaagggattggtccatctctcggtccacagcttatggctgagatcggtgatgtaaccagattcacgcataaaggagcccttactgcattcgccggagttgatcctggggtaaacgaatctggttcctatgcacaaaaaagcgtcccaacatccaaacgtggatcttcaaatttaagaaagactctttttcaagtaatggatgttcttatcaaaaccatgcctcaggatgatcctgtatatcaattcatggacagaaaacgcacccagggtaagccttactatgtttatatgactgcaggtgctaataaatttctcagaatatactatggacgagtgaaagaatatctttctgttcttcctgatccaagctaattcataacttttactttcagaccagcactggttgtggtggccttattttaatgcctaatttttaacctgtaaagttttttaactttcttcaattttagtattgactttttatttgcaggctaaagtaacgagaatgcgacgcacaattattcaaacgtaaaatcttataccctaatagcgagaaagactgccgaattgctccgacagtctctcattttttacaagttctccctgttctgccgccggatttttctccgtacagcctgcacagccaatgctgaaaacaagtatcagcaacaatatcattttgttttttcccaatatccggttctcctctcttaaaatggattttaatggttctatagcaattcgcagccatcaaacaacaaatagttacagatcgttatagtttaaccggatatctctccattttatacatccactcagaaacctttttttctcatatagacagcaatatcatgataaacctgctccctgccgatctcgttgaggatttcatgacgcattcccggatacagtttcccctttacatctttataaccggcccgtcgcatagcccgcactgtctttgcaaaatggcgcacattgatcagacagggatcctcagccccacttacaaacagtaccggcatatctggatttgtacaggaaaaatgctccacatcataggcacgcttcatcagttcaaataatgccagatacgcatcgtccgtaaaagtgaaaccacacaattcggattcctcatattctttcgccacatcaggatcagaacagatccaagctgtacacctcttatcctttcggaatttcattgcccctgcaccaaatgacattgtttcgataagtttacttctgtgtctcggtccaaagactgctttctctgtctttgcaatggcaactcccagaggcatggcagtattgtagcttggagaaccacacacgatcagcatatctacgcagctgtcatgttctgccacaaatgccctcactgccagcgagcccatactgtgccccatcaggatcagcggaagttccggatagtatgcatggattttcctgttcactgttcggatatcctgaagcatcgcctgtgctcccccaccgtatgtaaagccgagatcatcctgatgttttacactttttccatgtcctctgtgatcatgaatcaccaccacatatccaagttttgccagatactgcataaacggaatatatctctctttatgctcactcattccatgaaccagctgtacaactgcacgataaggtttcttatccggtatcagtgccatgaccgaaatctcaagcccgtctgcttctgatttaaaagaactctcatacttcatagatccacgccttctttctgtattttcgcatattattctttattttatccgctccgatgttactgttcactccgttcacagtaacgtagccaaaattcattccagattgcctgcggcaatggaattttggcttgtatgtctcgggattttggcatattcatgccaaaacacctcacgggacagtggtgtgtgaacagtaaccactctgattactataattttgattataagtaagacaattgccattgtcaacgcattctgatataatcaattatatcgttactgttactctgttctcagtaacatcacatctgcatgaatgttattgcagatacaaaaccgaaactttttaacataatacgtttcagagcagttatgctctagagtgtgtctgaaaaaggctttctgcaagatgtgacgcacatcttgcgtaaagcatttttcaagcatactctaagacaggaggcaatatgacaaaaggtaataaaaaaggacatgccgggctgatcattttcattctgatcctgattctcgccattggaggaggtaccggcttctatttctatcagcgacagcagccacgaaaagcagtggaacattttcttgacagcatgaagaaaatggacttcgacacgatggaatccctgattcagagcagtgatctcaccgcactggacaatgcagatatccgagatgccgcatacacagatttcttctcagagatcaacaaaaaaatgacttataaaatcacgaaaaacagatttgatattcagaatggtacagcttctgtcacagcacatatcacttacattgacggaactaatatttataaagcaactatcactgaatttctccgtcagatcgtttccaacgcttatgccggaaacaagcttacagaagaagagacacaggcaaaacttgcttctattctgagtgaaaaggcaaaaaaagtggaaaaagatgtattctccgaaacagatatcacctatccggtgatcaaaacagattccggatggaaaattgtttctctggatgatgagacagtaaaaatcatgtcagcaaacttcaagagtgttgaagaggaaataaacaactccctcaacaatatggataacgaagattcctcaggttcttcttccaatgcaccggaggcatctgcagatgatacgcttaatctcacaacagaaaaatttacgatcaaatataccaaacatacgatcaccaaagactttgccggaaatccatgtattatggtttattacgattacaccaataattcttcctctgcatccagtgcaatggttgatgtcagcctaaaagcttaccagcatggagaatcctgcgaggcagcgattcccgagaataatgacgatgcgatcgatcattttacagctgagattcagcccggacagaccgttaatgtatgccaggcatttacactgacagatgagagtgatgtaacggttcaggcacaggaggcattttcctttgatgaggatgcaactgccagacagatacttaaagtaaaataatccgattgtcagacagagttcctcaattgaggcagagaacttatttgattctgttaaaatatgcacagcgatttaaaattaatttgaacctgctgtgcatattttttgtcttccatggaacaatatgaaatgtaatagctttatgattcctgtcagagctgtctgcagccacagggagacgaaaggatggtgacttatgggaagtaaatgtttaagatatacggcactgacgatttccatcatcggagctgttaactggggactgatcggttttttcaatctgaatctggttgctctccttttcggaagcatgagctggatttccagaatcatatatggtctggtaggaatctgtggactctgtcttctgaccttctacggcgattcagacactgaatctgaataagaaagaatcctgcaagcaggattctcagcctgcggcgggtcgcttcagcgacataattcctctacgccgcagtgcgatcctgcccgaagggcttttttatgttataggaacattacggagtaatttcctataatataaaaaaggacttcggaaaatccgaagtcccaagagcgatagacggggctcgaacccgcggtctcgaccttggcaaggtcgcgcgttaccaactacgccactatcgcacaagcgggtgatgggaatcgaacccacgtatccagcttggaaggctggtgttctaccattgaactacacccgcagatattcagttgaaagagcgatagacggggctcgaacccgcggtctcgaccttggcaaggtcgcgcgttaccaactacgccactatcgcataagcgggtgatgggaatcgaacccacgtatccagcttggaaggctggtgttctaccattgaactacacccgcacagcttgttgtctgtgcatctctgtcgcatcaacgaagattagtatatatgatgaaactgtatttgtcaacactaaatttaaattttttctatttttttaacaacatatacaaatcatcatctgacaaacaatttgtcacgcagataaaatcatccgtttcgctgctcagctctataccgaataattgctatgcagtttatcagaaggagctttcactcctcctgatataagcaaatttccacctgctacttattactttccacgctgaaagcctggacttactgtatatgatggaacctgtcaggaaaacaaaattttacagtgttaaccagagatcagttctcccaatcccatacattcgtagcttccactgaacttcttggtttcttaatcacaagttcaggactcttcgcactgaccttggtgtttgccggaatagatgctgtaataaaggtattacctccgatgatcgtattctctcctatcacagtctcaccgcccagcacagaagagttagaataaatcgtcacattatctctgatcgtcggatgtctcttcacattggcaagcagctgtccctgacgggtggaaagtgcgccaagagtcacgccctgatacagcttcacattctttccaatctccgtagtctcaccgattacaacaccggttccatggtcaatgaagaaatattctccaatcgtagcacccggattgatatcgatacctgtataaccatgtgcatattcagacataattcttggaataaacggcacattttccagatacagaacatgtgcaagtctgtatacataaattgcataaaatccaggataagagaaaatgatctcctctttactcttggcagccgggtcaccgtcaaaacctgcctgcaggtcagtcagcagcatacgctgaatttccggaacatttgcaaaaaatcgctctgtgatctgctctgcatgttctttggccttctgttcttcttcaccctgatataaaaatgcaatctcaatctgctcctgcaagcagtcatacagatcattcaggcgatatgccacataatgctccggaaacacgctggcactggaatccacactgaaatatccgggaaaaataatagacctcatatctttaatgaagttaataatctctttcttatttggaagacgttctctgtcctttcccagaaagagttcttctttacggtaagtatctgtcagcttctccacagcctccagaattgttttcttcttatctgtcataatcgtcacctatctgctttcctcgcagctgcttattatccccaaacaatagcaatccagagggtacacaaccgcattttgttattatcttattacagcaaaaccaattcgtcaataaaaaaagaattgacctttccgtagattccttatataataaaaaacagttccggttacacttcagaactgtttctaatcttaatatggagatgtacccaagaggctgaagggaccgcactcgaaatgcggcaggccgggcaaccggtgcgagggttcaaatccctccatctccgctctttctttgtaaaattctttataataaaaatgcacaataagcttgacaatcgttgcttttatatgtataattgcaacagtaaaagaaattttacaagttggttttgataggggattggtcaaatggtatgataggggtctccaaaacctttggtgggagttcgattctctcatcccctgctcttaaaaacgctcgaaagccttgtatttactgggtttcgggcgttttcgttttatctcggatgatcaaaagtaatcatagaagtaatcaaaaagatactatatgaatctattatactgatccacatagtatctttttcaggcaatctacaatattgtcaacaaatatttcttcttaatcttctacttttcaatcttctctttttttctgggtcttctccgcattgctgtatgccatggcataaaagatttcctgggaattgagtttgacatcattcaggcttctgtctgcataatttcctgtttctgtcagtctctttcctttttcatcatcattcatcatggtctcgaacatccagtccagacgttcctttaatttctcattaagaaccggagcagccacctccacacgacggactgtatttcttgtcataaagtcagcagatgcaatatatattttttctctttcttttgtaccgaaacggtagattctggaatgctccagataacggcctacaatacttacaaccttgatattctctgtatatcccttaatctccggaatcagacagcagatacctctgacgaccatctctatctttactcctgcctgagatgcttccaccagtttattgatgatcaccttatctgtcagggaattgatcttgattccaatatagccttcctttccctgtttcacctggtcgatttcttcctgtatcatatccagaactctgttctgcagacatttcggtgcaaccagaagaagattggatttctcaacaacttcccctttcagaagtgccgcaaacacttctgctgcttcttttccgatttcctggtttgctgtgatcagcgacaggtctgtataaagtgcagatgttttttcattataattacctgtaccgatctgtgtaatataggacacacccttatctgtttttctggagatcaggcacagcttggaatgtactttatatccattcagtccatagattactctgcagccagcttcttccagttttctggaatattcaatattgctttcctcatcaaatctggctctcagctctacaagtacaacaacttcttttccgttttctgctgcttccaccagagcatctacaatctggctcttgtccgccagacgatataatgtcatcttgatggatacaacagaatcatcctttgcagcctcattcagaagattaataaaagatctgatattttcaaatggataggataacagtacatctttcttcatgatctgtggaatcagggcactcttgtcatctagctccggtgtcattctgggagttcttctctgatagaaaagtttgtcctgggcagtattcctcagatatccctgaagtccgaatacaaaggacatatcaagcggaaccctggtcaaaaatacgtgttctttatccacatgaagctccttacagagtgaacttatcatctttttatttaattctctggataattccattcttacaggattcattcgtcttctctgcttgatcagattctccattgcatccctgtaatccagatcctcatcataaatggtttctgtatcaatatctgcatttctggtaatacggagcagcgctttctccctgatctcataactcttaaacattttcggcagaaaatgaagaatcagttcctctgaaagcatgaaagtcccttttcttgtaggaatatcgatcaaacgtctgaatacagtattactgcaagggataatagctgtttttgtttttccacccttgctcatcagtgatgccactgcataaatatttttatttttcaggaatggaaatggctgctgtttgctcacaatatttgcagacagatacggtgcgatctcctgatcaaaatatgtttccagaagcttgccttcctctgccgataatctgttaaaattgatcagacgcactccgtaaggctccagttctcccatcagctgttcatagatagctgcctttttctgatccagatctctggtggcctgaatgattgcagttacctgttcttcactggtcatgtttgttttattctcacgtattacttcagatgcttccatctgatccatcagagttccgactctgactctgtaaaattcatccagatttgactgataaatagcggcaaatgtcagtctctctgcaagcggaactcttggatttcccgcctcatttaaaactctctcattaaacttcagccaggacagttctctgttcatcatatatacaggtaccgtaatttcttttgtctttttctgttgttttttcattcggataattcctcactctttttattcgtgatatcagtggcaaaatttatcaaaccttttgactctgacatcccataacgtttagaattataaactttgaatatcaattccatggaatgtccatgttatatttacgtaaaatttccagtcaaacaaataaatttatctgtttctcaataaaaaagtgatttctgctattctatagcagtcctttcgctacctgtattttctgtacgcttcccagacttactgccatacaaagaacagataatacgagttttgcttatagcatagatgattatccaataaaaaacaagactgcccagattatacttcggacagtctcgctttttatttactcattcaccggattcacatgaaccatacagtgttttacatttttaaaattcttctctatactatgatgaacattttccgcaatgtcatgtgcctcattcagtggaatctcaccatctgctgagatttcaatatccacatacatcttagaaccaaataatcgtgtctggagaaggtcgattcccttcactcctttcactcccatgatcacttctctcatgctctcttctgttgcctcatcgcaggaatggtcaaccatcttatcaattgcatctctgaaaatatccacagatgctttcacgatcagtacacagattgcaacactggcaatcggatccaggatcgggaagccaagtcttgcacccaagataccgataaatgcaccaacagaagacattgcatctgaacgatggtgccatgcatccgccatcagtgcaccggaatttattttcttcgcagcacttctggtataccagaacatccattccttcactacaatagaaacaactgccgcaatcagtgccaatgttccgggaattgcaatgcttgctcctgaagtactcttaataatgttctcaattccattcataccaattccgataccggttgccagaagtaacccggacaaaataatagaagatacacattccatccgctcatgtccatactgatgctccttatcggattttttgctggataaattcacaccgactattactacgaaagtacttcccacatcagatgctgaatgaatcgcatctgagatcatggcacctgaatgtgccagaattccggcaagtaatttaaataaggaaagtaacaggtttactgcaatactcacacctgataccttcattgccaccttatgttcccatgcaggctcttccttcttagctgtcgtgttactgtttgtcttgtctgacattgctgtcatgtttaatttttttgtctgttccataaccaggacctcctaaattttcttttcaaatatataagcttttgtactttcctatatttgagtttacaggttcttcttatgtcacatacattgcgccacagtcagaaaacatatttcctttctgtgacttatcaaagtgcggtcttacaggggtctttttgtatttcggaactgcacctgtctcagaaaatcctcctaaaaaaatccttctaaaagaaaatctttccaaaacatacttttcagaaaacaaaaagacacacctgcggaacatacactgtcccacagatatgtctgaaaattttcatatctgctgccgcttcgcgcggcccggccccacgccctcgagcatctcgggcatcgcctgctcagtttgtactgttgatctcgcattctgttgaatgtaatgcagtgcaaagagaatataaatattttttctgataatacactatagtatatcggttagtcaagccaaatgttattgaaaatttttatcatgatgaaacaatattctgcagccacacacccttcttaaccagcacaaatccaatcacacacttaatcaaatctgccagctgcacacatgcataaatcacaagcacatgaatccctgtataacgactcagcacaaacgcgatcggcacactgacgcaccagataaacacactgtcaaacaggaacgtaataatcgtctttccaccggaacgcagagtaaaataggttgcatgcaaaaacgcattctgcggcataaagaatgcagtgatcataatcagatacttcgccagctcccttgcctcatcattggtattataaagcatcggaaacagcggcgccataacaaacatcaccattgccacacaggtacagcacatcactgagaacgcgatcatcttgttatctgtatctctcgctttcttcatatctcccgcacccagaagctgtcccacaataatcgcaacagaatctcccagcgcaataaatacaatattaaacacattgttgatggtattggaaatattcagcgaagcaaccacattcagccctcgaatcgaataacactgagtcagcatcgccatggcagaagcccataaagtctcattaaacaacagcggtgtacccttgaccaaaatcttctttgtcagattcgcaggaaccttaagcgtgctgtacagcccctttgcaaatgcattcttctccgtatgcctgtgtgtccagcctattacaattgccgcctccacataacgtgacagcacagttgcgattgccgcacctctcacacccagtctagggaagaaaaatacaccatagatcaacagataattaaacaacagattcacacagattgccacaaccccggctttcattggcagaacagtctctccgcactctctcagagtactggaataaatctgcaccatcataaacggcggcaatcccaacagcataatatccagatactgttttccatacttaagcgtatctgcgatctgctgcgcagtaccctctccctgaagatacatactgatcagattctctccaacagtaaaaaacagcaaaatcgttccaatcgtcagaatcacagccatccagaacttatacctgaatgtctgcctcacaccctcgtgatccttctgtccaaaatactgcgccgtgaaaatacccgctccggacacccctccgaaaatacacagattatagacaaaaatcaactgattcacaatggaagcccccgacatctgctccgtaccgatccgcccgatcataatattatccagcagactcacgaaattcgtaattccattctgaatcatgatcggaacagccacagccagaaccatcatataaaacttcctgtcaccgataaacttcttacgaaacgatgacctttctttcgtcctctccataaaacttttcctcatccttcttcacaaaaacagactgtcccgagacagccctcgccttaagcgttgtatcacctacattactataaaagccccaacatttcaagcccatatctgtaaaatttatactaccattttctattccgttttttctccactccatatccgataacacacttccatactatcattcacagtcccagccagttcacagcgaagaaaaataaatgtttttaaccacatctacagggggtgtagcaactcttagtctttgggaatttgcgttatgtcagaaaaattcactgtctgagcgaagcgagtttgaatttttctggcatggttttagcaaatttccaaaggcttagagttcctgcccccgcagccgtggttcaaaacatttatttttcttcgcgtcccctttgaagccataaaaaagctgccgtccccaataagtgaggaaaacgacagccttttcaaaaaagtatttgcaagcctatttaatagcaccctcaaccataccattcataatctgcttctgagcaatcaggaatacgatgatcatcggaatcattgccaggagtgctgcagtaaggatcagatcccactgttttacataagaaccaacaaacgcctgtacagcaaccggaagagtcttaaccttaccattctgtcctaacatcagagaaggaagaaggtaatcgttccagatccacataccattcagaatagtaacagtaacaataaccggtttcagaagcggaaggataatgcggaagaaagttccctcaggagaacatccgtcaatcgctgctgcttcttccagttcatatggaatacctttaataaaaccagttaagataaatactgtcatagcaccaccgaatccacagtatgcaaatacaataccaggaatagactgaagcatattgattccaaggaatttacctacatcacggaatgtagaaaccagaggaagcataactacctggaaaggaattgtcatggatgcgataaatgtcatgtaaatagccgtagaccattttgtcttgttacggcagataacccatgcagccataccgccgaataaagcaagtaatacaagggaaacaactgtaatgatcgcagatgttccgaatgcactccagaaactgaagttagagttgttgacaacgtttgaaatatttgtcttaaactgtgcaaagcttgcacctgcaaagcttacagggttggcaacaataccgtttgcattcttaaatgtattaataagtaccagatagaaaggagataatatgtacgctgcgataacaatcgcaacagctgtaagcactacctttggagttttcttcgtaaccattacatttcaacctccttcttattggaaattctaacctgaataatagatacggcagccaggataatgaagaacagaatagctttcgcctgaccaagtgcataattgttcttggagatcgctgtattataaatattcagagccagcatctgagtaccgtttgtcagatagtttccgaagaaacttgtgacagaacctgtaccatttgtcagagccatgttaacatcgaactgtttgaatgcagatgttaaggtaaggaatgtacagattgtaattgtagctgcgatcatcggaatcttgatcttaaataatgttgtaacagcatttgcgccatcgatctgagatgcttccagtacatctttaggtacctgtgtcagacctgttacatagatcagcatgatataacctgcatactgccagatataaacaacgatgatagccatcatagctgtgtttgtctttgacagaagtgaaatattatttgtcatcttgatcagtacgttattaaatacgaactgccatacataaccaagtacgataccaccgatcaggtttggcaggaaataggaagctctgaagaatgagagtcccttaaccttagaggtacagagtaaggccagcataaacgctactacgtttaccagaaccatgttcagaactacaaacagaattgtgatgatcagtgaccagagaaaacttggttcattgaacattgccttatagtttgtaaatcctacaaatcctgtcatcttgattccattccagtctgtaaaggaataaaacacaccaaggcataatggaataataactgttactacaaatgtaaataacaatggaaatacaaatataaagttaacgatgcttctgtgatgttttaatgtcgggaataaatacattcccagtaaaatgccgattgcaccaatgatcagcgccggacctctccagccagctccgcttccggaaatatcctggatcaatgatgctgccagtaaaataataccggcgatcaagcataccatggaaattgcttttttactagcactgtttgtattcattttgcctcatccttcctattttttatttcaaagcaaaaatcaatgtgtcttagacttttttgcgtacctgaataaaggtctgccggacctttactcaggtatgcagcgcaaataaaagtgggcggcaacataagcgccgcccataagtttcaattattagtttgcgtatgcaccctggataacctgttccagtgtcttaacgaatccggcttcatcaaggctgccagatgcatagtcagcaaatacctgacctgtatagttctgtgcaagtccttctttctgctctaaccaatgccaagcagatgtctttccagcagatacataatcagtgattgtctgagcaaatggatcatcaccaacgattgtgcaggacttgaacgggcttacgaaaccagcttctttaacaagaacttcctgagcttcatctgttgtcagccactgaaggaatgcttctgctgcttctacattaccatctttatatactgaccaccaggatggagagtttgtaaggattgtatcaattccatcttcaaatgcgtatggaatcataccaacttcgaaattaccagcttctttataagcatctgcatcatcacctgtcatagttgcaccgatccaggagccctgagtaacgaatgcatatttaccagatgagaagttaaggatctgctgatcatatgtaccggatacaagaagtgccggatctgaatactgattcagaagacctacaaagttagcgaaatctgttaaacgatcttcgtcaaccttaccgccatcattgagcatatcaatataagtagtgtcatctctgtcaagacctgaatccagatagtttccaaataagtggttacctgttgaccagtaaaggttaactggttctgctgcataacctacaactgctgtcagtccaagctcatctttcttggaatcaattgtctcaaatgcttctttgattgcatcaggacctgttaatgtagaaggatcaattcctgctttgtcaaggatgtctttgttataagcaagaccgattgcttctgttgtatatgggaaaccgattgtaccctgcttttcatcaacataagctgcatctgtgtcagaagcccattcctgatcactcatatctactaaaaggtctgtccagttagcgaagtctgtagcaccaccgtttacgaagatgtcaggcatattatctgactgatagtatcctttcagagtaccctggatatcgattccgccgcccatggattcgatttctactttagttcctgtttctttctcatacatttcagctaatttcttcagctgagcgtcaacttcgatcttaccgtttacaagacgaatactgtcaccgtctgctgcctgtacggatactgctgccggaaccattgatgcgatcatagatactgctaaaagtgttgcaaatacttttttcttcattttcgtcacctcgtcatttttttaactgtttctttttaccttttgcgcataaggttttttgatagttgtataataccactttgtttctgaaatagcaatacctttttcgcataagtttgaatttttttatctttctttttcgtcatttgttaaatatgcacaatttattttttctatcttattacactatgtccaaaaaagtgctactttgaggtcaaaaaagtgcatactctttgaattgtatcctatggcttgtgcatgtttttccttcgtcagacaagtaaaaacttctgcgcagaacattacggaataatttcctgtaacataataaaacagcatttcaggttctgcacccgaaatgctgttttattatgtcttattcattttgtttccgtttatgctgcctgttcttttttcttaccggtaactgtaagcagatgacttttgatcagtaccggacgtactgcattgtagatcactgctaccagaatcaccgaaacaactgcattgaataatgtcgctacagcactcatttttgcaagtgcctgtgccagttcctgaggctgtccgagaatatactgtttgtagaaatatcctacgatcggatctgccacaacattaaacgcgagacctgctacagaggcaatcacactccatttgaaaacgtatttcttatctgtactttcattaatctttgcaatcttatgtgctaccagacctgtgatcaggccaatacagaatttcagtacaaatgtctttggtgcgcctgtgatatatacaggatccatcaggtctgcgattcccattccgatggcaccggataatccgccgtatacaccgccgatcagaagtgctgccagtacgcagaatgcatttccgatatggatggatgttgcatcaccgcccggtacagggatcttaatctgcaggaatgtaaaagatacatagcataacgcagccataagagctgtctctgcaagttttgtaattgtgctgttctgagtattcataataactgtcccctctcatatgatctgatagaaggcccatatcaataagccagattgcctgtttgattttcactatcagattttttatattttgacgcatcaatatgttgaagttatcatacgtgaaatgtgtcattatttcaatgaccaattttttgaattttttagaggtcagattgaatattctgtaaaagaatcctgcttgcaggattctccgcctgcggcgggtcgcttcagcgacataattcctctccgtcgcagtgcgatcctgcccggagggcctttttgtgttataggaacattacggagtaatttcctataacacaaaaaagccctccgtctgcatgctgctcacatgaaaacagagggcttcattattctatttgcttagattcttgctacgcctgattttcttgctgcttctgctacagctttagctacagcgtcttttacgcgtgggtcaaatgctgccggaagaatatattccgctgttaattcttcgtcacttaccagacctgcaattgcatatgctgctgcaactttcatttcatcgttaacatctgatgctcttgcgtccagtacaccacggaaaagtcccgggaagcagagtacgttgtttacctggttcgggtaatcagaacgtcctgtggataccactgctgcgcctgctgcttttgcttcgtcagggaagatttcaggtaccgggtttgcacatgcaaagatgataggatcttttgccattgtgcggaccatatcctgtgtcagtgttccaggtgcggatacaccgatgaagatgtctgcgcctttgatcacttctgcaagagtacctttctctttgttgaagtttgtgatcttagccatctcttctttgatcgggtttaatccttctctgccttcgtaaatcgcaccctttctgtctgtcatgattacattcttaagtcccatggacattaacagtttgatgatagcgatacctgcagcacctgctccggaagtaacgatcttcacttcatcaagcttcttgccaaccagtttcaatgcgttgataacacctgcaagtgtgataactgctgttccgtgctggtcatcgtggaagatcggaatatcacagcattctttcagtttcttttcgatttcaaaacatctcggtgcggaaatatcctcaaggttgattcctccaaaggatccggccagaaggcttactgtcttaacgatctcatcaacatctttactgcggacgcagagcggaatcgcgtctacaccgccaaattctttaaagagtacacatttaccttccataacaggcataccagcttccggtccgatatctcccagtccaagtaccgcagttccgtctgttacaacagcaactgtattccagcgtcttgtcagatcataactcttgtttacatccttctggatctccagacaaggctgagcaacacccggtgtgtaagcaaggcttaaagcatctttggaatctactttggctcttgatacaacctcaattttaccttttaagtcataatgcatttttaaagattcttttgcgtagtccattttgttttggctcccttctgcactctttttttgagacgcctacattgtaacattaacccggctcagattctactgtttttctgaccttttttatcaaaataactaaaaccgcatcttcctgtagaaaattaggaagatgcggtttcagttattgtactttatcatttgatatcaggttccaaaagaaacttattatcattatttatctgtatcaaaatgtacttctgtaccggcaactgcacgctcatccaggagttgtttgaaggtcttggtctttgctttttcttcgtagtcatcggaccagtagtagcctttcagctcgtccatatactcatagtaatcgcaaagatagatatatactgtggaaacatccctgtcctgtattgcatatgtgtccgcattactgtttgccactccgccatatggcatcatatctccattggcatccagcataacagcaacatattttgtttccggatcctgcattttcatagtgatctcaaatggtgttttcgtaatggagagaacaccatctccattttcatctaccacatttacatccttttcaaccgtatcggaagtatttttctctacatctacgttgaacttccagtcacctttcagtgtccatgagttatatctgttatcaccttcgtttgcctcaggatatcgttcataatactcattccacatctcagtgaaaaactgatgctccagatccttctgctcttctgtcaggctctcataatctgcatcgtctgtactgattccatgctctgccattttctgattatattcatcccgcagatcctgagggatatccggggtggtatcctgattctccggaagagcgcccacaatatctttcagatccagctccatggtaaacctgtcaggtactttaatgtctttgacataatcgctgattgccggacctcccacctgaggaagcttctcatcactgtattcatccattcccagtgcctgggctagcttatcaaaactaaagtcctcagaatctacatcaatccctttttctttgaaaaatgcgttacgcacctcatagaattttgtccatcctgcatcatccactgtcatatcttctacaggaatacgcaaaactcctgcataggtgttatcatccagcatttttccatccagataagcattgaacagattactttttccatccatgtaatcatatttcactgtagaattctcgctgagcttaatattgggttttccatcagatgtaatgaatgtatccgggaatttatcctctgtatggattgtcatggacaggtacagagccatttcattacagtatacttctgaaagcgtgacagttgttccatctactgttttactgtatgattcattgtctttcgttttatctgcattgttattttctgttgtattctgatcctcagcctgagcactttgaggattacctccgtcctcctgactttcatcagtatctgccaactctgcatcttctgcagaatctgtcaactgctttgcatatttcgaataatcgccataaaatcccatggaattaccgagctgcttaaatacatttccaaccagagggatgttctctgcaaatgccggatttgtgatacatactgttgaaaatacagctgcagctgcagtcagtcccaaagctgttttgtatactgttttgaatttcttgtgcgattttgctgttcctgtggatttctttccggaacttcctgttgatttttctgttgatttctcctgtaatctttgcaccatattctctgtattttccgtatgtccagaagctgctgccatttctctgattctggaaaatgcttcgttttttgcatcttctgcctgctttggcaacggaaaatctgcctgcatgatttcctctatcacattgtcatttctgttattcttttctttatcaaaatccaacttcttcgccatgatcacttcattcctttcttgaacttactgttatgtttcctgctgttactgatcctgttctcagattttcattctgatattctgcaaaccttctgctatacctgtgaattctctgtttttcttttttttctgctgcagtctcttcttctgaatattatcttctgctgaagtatattcctgctttagctgcatacgggctctgaccagtctggtttttacggtgttttcattcatatttaatatagaagcaatgtctgcgatccgaaatccctctacataatacagaaccagtatgatcctgtaggattcgtccaacattccaagcatttccttgaactcaaattcctcaatggacatatcctgtccggggacttccggaagttcttcggctctgctgaaatttttgtagtgtctgtggattttattgcattcattgatcaggatacggatcatccaggttttgaaatattccggattcttcagtgtatgtattttttcaaagcaggtaagtatggtatcctgtatggcatctgcggcatcctcatcattatccaggattccccttgccaccttgtacattgccagagaattcttttccatcagttccagaaatgcatccgcatctcctgagatggagcgttttaccaactgtatcaaatgctgatcctccttgcttaaagttttatgtgttactgtttacttcatgtccagtagctcttatgtttttacaaatatgtttcattcgaatgaagctttgttgttttgttttacacttattagatggggaaatataaagaaaagtttcatatcttttaactaaattttcaggtgtgagattttttatatttattataacctctcatccgcatataattgtaatacaaacaaattataagccctgaattttcccacaaaaaaaaacggcacatttctgcaccggtttttatcactcataatctttcttaatgttttccttttattcttcagcattcaatctcttctgatacatagactggagcaggaattttcctgtctctgttttgaatactttttccagcatgtttctcacattgtttccggaaaaattactctcatctgcatttaccagataatctgcctctatcatgatctgataatcaataccgtcgattccggttattgtatgatgatgacttacaatataagaaacacgatctacaaattctttcggcagatctgaatctacaaaaaattcctctatcagtgccgcactttcttcctcctgatgtttaccgttggcatttccgtattttactctgcagagagggcaggcaatatcatggacaaccgcagtaacctccaccagcttctgctgctccggtgacagattttcgccctctgcgattgtttttgcatatgcgtatactttcatgaaatggttgatgtcatgaagatctcccttggaatactctaccattttccttacaacttctgctactgtcatgctttgttcctgcctttctcttacgggtttatttacttgtgcactccgttctcagtaaccgggtttatcttattctgaaaaacagcagaatctttcgatcctgctgtttacaattatcaattatttgcagagttcctctgccatggcctcaatctctgcttcgtttgcttcgcttaaggaagaagtgatctttacattattttcaagccatgtgatatttttactcttttcaaacattccctgcatgattcttgctgctgcaggtgcccagcttccgttttcgatgagaccgatggtacggttctggtagctgcgttctgtaaggttctctatgtaggtacgcataaacgggaaaatatctccgttgtatgtaattgtggcaagtaccagtttgccgtaacggaaagcatcttccactgcttttgccatgtcatctcttgcaaggtcaaatacagttactttcgggcaacctttttcttccagtttctgtgccagaagttctactgctttctttgtgtttccgtaaacagatgtataggcgatcacaacaccttcgctctctactttgtaggaggaccagatatcatatttctcaaggtaatgtcccaagttctctgtgaggattggaccatgaagcggacagattgtctggatatccagagttgcggcagctttcagaagcttctgaacctgtgcaccgtattttccaacgattccgatatagtaacggcgagcttcgcagtcccagtcttcttctacgtcaagtgctccgaatttaccgaaaccgtctgctgagaacagaaccttatcagtactgtcatatgtaaccataacctccggccagtgaaccattggtgcaaatacgaaagtcagcacatgttttccaagtgtcaggctgtcaccgtttgcaaccaccagtttctttccgtccagattcaggtttctgaagaaatttcccatcatagtgaaggtcttggtatttgcaactacggttgtgtcaggatatgctttcatgaagttctcgatatttgcggcatgatccggctccatatgctgtactaccagataatccggtttcgcaccgtccaggactttggctacattttcaagccattcatctttgaaattagcatctacggtatccataactgcaatcttttcatccatgatcacatatgagttataggacataccgtttggcactacatactgaccttcaaacagatctatctgatgatcatttacacctacataataaatatcatttccgattttcatgataacatgttcctccttagcgatatcagggccggtcaaatccggttaaaaattccaatttttttatttctgaacctattatatccacattcatatcgttcgtcaagtttcattttatctctaaaatttcatcccttaactcacatataaaaagtaatactatagttttatttaatatctattctgacagaattccatattccttatataaccgttttcgagtctctgcgtttgtcacaacagactgtatttctgcacttcttccatccataatcaaacgattaagcaaagtgcttaaccgttcttcgccgattgcttctccaattgctctgccctttgcttctccaattgctctgccccttgcttctccaattgctctgccccttgcttctccaattgcttttgcctctgcttccgcctctttttgaagccgttcaagcctttcagattccagttcaagaacttttccacccataatctcacctattcctttccggactgtcttttcattctgacatatatagtccgctatttttatgatcagtttatttaaattcatgtataaagccgtcttatctgctcctgaaagttctctttccagatttatccggatttcctcatagtcatttagcaaactctggaacatttccggattctcactcatttcatgaatatccttttcatatcgcataatataaaacggcagaagcatcagtaaatttttttcaaaaatactgtctctcgtatatgtctccagtttcattgtcggaacccgataatgtactatgttctcatccggaagcaccatctctatctccagaaaatccggcgtattctttccgcttctcaaatataatacgcaggactttggaaaatccatcctgtatttgcgtccctgtttctgtgcattttcgattgctatggagaaatcatattctatcatacgaattgccatagttgtatcgtctacactttgacattcaatatgatacaatttaccagcaatctttaaacaggaatccgtgataatctctccgttttcctgctgatgttcattgcgcagctgcacaatcggtacattctccggataagaagtatggaacacttcattaatcaaaggtactgccagatatggcattttctcaatcattgtacgaaatacatcatcaaatatcgtattattcattagatacctcgcttttattctaacatacagtaacaatgtttgaatacccaatttgcacaaatatcataaataggatactccttatctttcgtacatgctttcataaaaggaaatagatgaccgactggtcttgaactcggatatgtaaattcagtgtaacaaacacatgctgttccgtcaatcaataattttcgacacatcaacactgctttaaaaatttattccttacatttcggtaacaaattttcagttcacaatacacaaggctgtcacaccacataagcaattagtgcaacagcctcttttctattctctgatatcaggctcacgaaatcctgccatctttcatttcgaatacagtatcaacgatattcatagtagattttctgtgtgatacaagtactacagtctttttctctgaagcctctcgcaatgatttcaggatgattccttcattcagggaatccagatttgaagttggctcatccataagaatcagcggactgtcatgtaagaacgcccttgcgattccgattctctgtttctcgccgccggataaggtatctcccagttcgcccacttctgtgtcgtagcctttcggaagttccataatgaaatcatgaatggatgctttctttgctgcttcgatgattgcctctctggaagctcccgggctgcctaccgcaatgttgttagcaatggagtcgtgaaacaggtgagtttcctgtgttacatagctttccatgtcacgcagatatctggttgggatttttcttacgtcttcaccgtctacagatactcttccctgatttacatcccagaaacgcatgagcagtttcagaagtgtagatttaccggaaccactggctccgtggatgccggtaatcttgcctggctccagtttcagggaataatcatccaagattgtttcattttcataggcaaaggtgacattctttgcttctgcacctgaaaaattttcggataccgtttttatatgcatatcttccggaatttcttccaccatcggtgtttcttccagtaaagacagaactctctcaccactggccagtgtctgattcagattgttggacagactggataacgctaccactggtccaaatgaacccatcattgcaatggtacagataaggattccctcgaatccaatctctcctttttcgtaaagccatacagtcagtgccaacattccaaaggatgccaacagaatcaccagatttgtaaatgatctctgagcaccttccattttacttaatttctcctgcattcccgcaagacttcgggagcgctcagacatctgttcttttcgtttctccccctgatcgtactggattgtttcatccagaccacgaagggaatctaatacaaagctgttcagttccccgaagtttgtacggaattccattcccatctgacttccacgtctgccgttccacatagggatcacaactcccacgatcagataagcggccagcgcaagaagtcctgccatccagtgatatcttccgataaatactaccatgaccagggaagtcagggttgcaatggcaatcggtgatattgtatgtgcataaaacacttccagaagttcgatgtctgttgtaatgatagagatcagatttcccttgtcccgtccttccagcttcgcaggacagagttttcgcagggctgcaaatactttgtgacggatgattgccagaagtttgaatgcaataaaatgattgcaatattgttctgcataatgcaaaattccgcggaggactgctatgatgatcattacagttatgattgtttttacacttcctgcacctcctgctataagcccatgtacaattacctgccctgcaagaatagacagaaaaatagcacagagatatccggctgttcccaggatgatcgctgccagcatgatatgaagcaatggtttcaccagaccgatcagacttcccataattgagatagcacttctgcgttttttcgttgtgtccgctccgcatgatgttgtgctttcattcaccatcttcttttgtactgtacttttctgcatactttttttatttgtatcagacatccacagttttctcctttccatagctctccaatgccatctggctgtcatacagatgtctgtattcaccattcaattgcatcagctcttcatgttttccactttctcttatttccccgtctttcaggaaataaatctggtcggaatttaccacatttgccagtcgatgtgagatcagaagcactgtctttgttcttgcaagctggtgtatcacatccatgatcagttcttcactttccacatcaatattggaagcagcctcatcaaaaatatatactgacgagtctctcagtaatgctctggcaatcgccagcctctggcattgcccgccggacaggttgccggctttttccagaagttttgtctgcagcccgtcctgggtctgcagaaatcccagaagatttaccttctcaagaacttcctccatttccgcttctgttgcatccggttttgccattctaagattctcttccactgttcccttaaacagataactgttgtggcggaccagtaccacatgtctcatcaaatctgtttccttcacctgagaaagcggcacaccgccaatagtaatctctccggtaaatcctctattctttgcagaaatgattcctgcgatcgtactctttccgcatccagattctcctaccaaagacacaaaacttcccgccggaaggtacagatcgattccttttaaaatctctctatcttcttcatatgcgaaatgtacattcttaaaagaaatatccaatgatccttcaggcaaaatcttctctcctgtctgtggttccggtaaatctaatattttaaaaatcttgtcacttgccgccataccattcattgcaatatgaaaaaaagatcccaaaagtcttaatggcaggaagaattcacttgccagaagaactatacataaagttccggaaatgctgatatttcctttcaaaaattcagatactgccactgccataccaattgcagcgccgccatatgccacaatgtccatcacgctggtagaattcagctgcatggtcagaactttcatggtaattctgcggaagttctgggattccatgtccatctcatctgctttctgctgatctgcctgataaattttcagagttgtcagtccctgcagattttccagaaatgaatctccaagacctgtgtaaatgctccagtatttatccaataacttcttcgcaattttctgtactgccacaatggaaatcgggatcaaaggtacacaaatcaaaagaatcacactggctttcaggctcactctgctgagaatgacaaacagtgtcagcggtgcgatcagactataaaataactgcggaagatattttccgaaataagtttccagttgctccacaccttccgttgatacctgaaccacctctgaagaagatacctgttcattataggatgctccaagcttcagcatcttttcataaatcttttcacgcaggatacgcttcacatccacgcatgccagataggatgaccttgcccccattctctcacagataaatctaatgatcactaccagaatcagcgcaattactgtgcgttcaacgactgctgttgtcacattctgatatacgactttttccagtaaatccgcgattgaaaaaactgccagcacctgcgacagaagtgctgcccactgccacaggattgtatatacaatatattttttcgcatgggataacagtcccaccagtcttgtttttatcataagttcctcttttcttttttgctgcaaatcagatgccagactgccaaaaacggatgatacaaaatcatcctcggtcccgagaatctcattacctgacagatctgttctctcttctccggtttataacagtgtaccttacagtttgcacagaatgtcttctgctccataaacggacatttctggcttctaagctttgcgtaatcggaaagttcctgacagacagggcacatctttctgccctgacgttcttctttggaatgatttttccggcagtacagttggatcatttcttccacaacgtgctgctctctctgacgtttcttttccactttgttcatgttattctgcaccttccagtatttctttttctgtttttactctcaagaaaaaatacaatacatggcagatccagaccacgatcagacagattctgccaatcggcacatttttcatacataaaaatcctatgcccatgattacagttaccgttcccatgatgcggagttttgttcccatggtcatggctcttttctgcacaaaactgtcgagatgtttcctatataaatttgttccaagaaaccatgaatgaagcttctctgaactattggcaaaaaagaataacgttgccatataaaatggaactgtgggcagaatcggcagtacaatccccaccgtcccaagcccaagacacaaaaatcccaatatcatccaaaagattttgagtgtatgtttcataattttctccatccttttctctatctggttacctattgctaaccgtcaggttattgtatcaatactattggattagcgtcaactaatttttgcagtttcgttccttatgagaacggtttatgaatttctgaaatacctgtaaaatcagctttttgtcataattgtgcataataaaaaggccgaactttcttcatttcgacctttaatcctacatccagaatgtcagcactgctgtactctccggcatatgtgcgtttccaatattacaggcaacagtaatgtgaactgtgccctttacatttcccatcctcccacggaaaaaatgacaggcactgagcggaattttcagatgtccatcctttataaccgcttcataaagctgtccctgcttctcatatttcaaagaagaaatatgtccccacatcctggttccatcaatcctggatcgtccgttaacctcccggattgtcagctccagccagcttccgcgtgtattatttcgaataagtgcaagatgctcaaatccctgatgagccatggaaatcctggtttcactgtttctgctcatctgatgaaccgcaatcccaacctgaaactttcctttctccaatattttctcaataaaatatgtattcagctccctgctgtgctgactatctctggcatcttcctgactcttatcctgtttctctatatgctctgcagtctgcctcccattccttatcatattcctgagcagatcataatctacattctcaatcaactgccgcatcttctcaggaatctctttttccggaatattcattgctttcagatacagtttcacatcccgcagaagtttcttgtaaatcagtaaggcatgcgttccctcggcagtaaactcatatttctccgtcagatatcctctctccatgcactctttaaagaaacgactgaccggtccatgactcaccccacagatgtctgcgatcattgtaacacttccacgctttttccccaccttttccagttccataagatactggatctgaagcattgagggatgcagaagatccacactatcctgtttattcatgccccttatctctccgacttccagatatgtacatcaagttcccggctgttccagtcaacaggcttctcaccttttctcgtaaacgcaatcagcgcgactccctctatgatcggatcctgacatcgggttaaaaacttaaatgcaccagatggtatccggggattttccattctctcttccgcctgtatccatccctgttccggatctttgtaccataaattctgagctgaagcctcaccttcccttttgatcagttcaaaactgctctcatcttctgtaacatgcagccggatattctcagaaaaatgtttaaattccctggcaaatcttctcggatacgtcttctctatctggtagattcccataagaaactgataactccccggccggtaccagctacgcagatccgactgcttcaaaatcctctcaaaagtatctccataatccacaaaattgcaaatctgctgaaccgtctcctcactgatcacatgctccatacgacaggcatcctcttctgccttctcctctgaaacacccacaaactgcagaaactgcctcagaatttcatgacgatattgaaattcctcacctgtaatcttcccaagctctgtgagaaaaatccctgattcagcttctttcccctgtaatcctgtatacgtctctttctccccgacaacatatccatgattttttaattgtttcagacaaaaattaacttctcttctgctcatattcatacggccgcataactcctcaaccgtaatctctgctcctgcattcgcgatcagacaaatctgctctaacatgtcttcctcaatctcacgtcgtgaagatggaagctgaatattcgtttcctttatttcttcaaaatcagtttgcatcagttttctcattttgatcccacctgaattattctataataattttctctccaagtaccttatatcagcaggttagttttggctaatttgtattatatgaacaattctgcgttactgtcaagccaattctgtgtttcttttttttatacaaactgattgattgttactgttcacacaccactatcccgcgaggtgttttggcataaatatgccaaaatcccgagacatacaagccaaaattccattgccgcaggcaatctggaatgaattttggctacgttactgtgaacggagtgaacagtaacgattgatttgctttttcagacaactataaatcttctggcagcatccctggagcgtgtttgaaaaatgctttccgtaagatgcctgtttcatctgtcagtttctcatagctgttttctggtttcagaataccattttccaattcttgtgtgatttctgtttatacctcatccttttttaactttcgttctaaccctaaaacttcttttctgcacaattctatcgcatcattacaggtttccacatcatcaccatctatctctatgctatcgtcaccaggatatctagttgaaaaataaaaaccatctatcattctcatatgtgtctgcgtattttttgaaaactctgctcccatatttgcttttagaaatttcatcagtctgttcagactatgtgtacgcaaaatattttcaaaatctttctgttgcatagcatcatccggtttatagtattctgagatcagatgcttcatatatttttcgcatattccctgtgccatggcccccatcatatttgccactatccccgcatcataagaagccttaaaatatcgaaaatcgttttctgcaaaatcaaaataactatttaaggccatatctgaattccctcctttcgcacatttgtataatacagcattttgttccttttccaatcatcgccaactacaattttcagatccgtttctgcatcatccaattcctcagaggatacttctgattttagaagataaagatattttttaagttccggccgggagcggaatgactctgacagttccagaaacagatcaacatcactgctatatttctcttctccccgtgcacagctgccatacagatatattgtcttaatataaggccttatgcatgatgactgaatagttcgtaaagcatactccgctgcatctctctgccgttttgatctgatacatgtcagcattttctacccctccgttttctctgtatattatttccagattgtacgtacattttctgcttcaggatttctttgtaaaaaaattataacattccttatcttctatgtctatcttccatttatctggtgaaaaattagagtgtattattgttactttcttttattttccttcaaagatctgagcgatcggtgaatctgcagacagtatcactgttttgtcctcacctttcatagatgtcttcagcgcatccaggcttctcacaaatgaataaaactcacttctgtcctcttctccataagcctgcgcaagaattttcatatattcctgctccccttccgcccccaggatctctgcctgttttttagcatcagaaatctggattgctacttctttgtcggttttatttcgaatcacctttgcttcagagtttccctctgccttgtaagtcgctgcaatattatctcgttcagaaatcattcgttcatatacagcttccttattatcatccggcaggtccagctgcttggtttcgaatttgagaagttcgattccatactgatccatgtttgttcctattgcctccatgaccatatcagacagttctccgtcacgacttgtgatcacctgatcctgtgacatactgctgatcgcatttttggtagcattatacacagcagtattaattcggctttcgccgctttccacagaagagtttaatgtctgtgcaaatttaagcgggtcgctgattttccagagaacatagctgtcgctgatcattgttttcttatcttttgtaattacatcagatgctgccagatcatacagcagtgtttcctttggcaatgactgtgtactctctataaacggaatcttaaaactgattcccgatgagctgatcaccctgtcaaccttgccaaactgacggatcagcttgtattcattttgctgagttaccgttaccgacgctccgacagctacaaccactgcagacacaccaattaatattccaattttcttacctttcataaattagtcctttccaaattatatctctatccttcgtatttcatttaccaaaacacttttatatgaaatattttctgtcatttctttattcgttctcagaatcatttatattttgtgtatcctgagcactctgcgggtctgtgttcagtgtttctgtcggattctctgaactatcccctgtaaaagaatctaacggcagaaccttctgcactccatctccattatcaatcacaatcttcattcccggcagcacatcttccattgcctcatagaacatacgcttctttgtgatctccggattcttaacatactcctcatacatggcattaaaacgtgcaacctcagcttccgcctcattaatccttacctgcttctgcgcctcagcatcctgaatgatctggtctgcttctgcctcagcctccggaagcttttcgtttctgtatttattggcattattcaaagcagtttcttttccctgcttggcagtttctactgttttaaatgctttcataacttcctgtgtgggtggttctgaatcctggattgtgatattcacaagctgaatccccagatcctgttcctccatctgcttcaggatcatttctttgatcttgctctggatttcaccttttccggtggtaagcacttcatccacatcataacttgcgattactgtacggatacagctttgagaaatattttttagaatatcttccggttcctctgaattataaagatattttaccggttctaaaattctgtactcaacaaagaaatctacatcaataaagttataatccgaggtaatcataatgccctcattctcaaccaccgaattatctcccatactatatccaataggaaatccctggatcgttgtatttactttttgtactttctgtataaaaggaatcttaaaatgcagtcctgtttctgccactgccttcggcactccgaaagttgtcaatactgcctgttcctgctcctggatctgataggtagcatctcctgcaagccctgcaataatcaccaaccctgctgttcctattacaatacgtttcacatgttttcccggcttctgtaattttttaaatggatttactctttcgttcacttttctcctccgtttcaccatttgacataattaaattttttgcttctaaaaatttctgaagaaaagaaaaagactttcatttcagacataacatgagctcttctcttaatgtctaaaacaaaagtcttgccgattatatcataatgcgggcattcttaatctgccgttctgacgcatttatgtaccatttataggaaaaacaagtccagttcttcataacgatggccgctactcccttttctttgagcagcatcatatcataactatttacaaaatgcaagaaatatttttctcaaacgccccatacagtcctcagcgtttccaaatccttatttataatttgcatctgattctgctcattacattttctcaacggaagcaggttataataattctcaatgatgatccatccttcatagccatgttttttcaggatttccatctgagggaagaaatctgtgtttccctctcccagcagacagccgcctggttcattgataccatcttttacatgaagctgactatccatatacggataaagaccttcaagctgttcacactggttcatattaaaattaaatttgaagttctgtgtatcaaagtgtactgtcagattcggcatacggatttctttcagcagctgaatttgttctttataatccagcgcattttctgtcataacagtaatatctttcctaatcgctttttcacagataaatctcagtgcatcctttgttgcttctacatgagattcttctgtaatcagatttccaaggaagtttggaaccatgatcttggatattcccatttctgccgctacctgaactgccagttccatctggtcatacgcgatctttccattctctgtatcttttccatggataaattcatgatccatcacatcattaagaacaatagacggatattcgattcctaacctgtttccctcttcaagatacgcttcctgaacctgtttctgagctaacggataaccccattcataacttccaagttcaagttgaattccatccagtccagcttcctttgcaatctgtggtccaaaatatccaccaccaggaagtccccatgccacacagccaaatttaatctttttctccatatatgccacctactctaaatttgcatgattcttaaacatttcttcttctgtttttccaagtttcttcataagaatcataataactgcgtcataaacgatccaactcatctgttcaaacgcatttcccataggctgagcagattcacttgtatcttccaggttactctttggagttgcacccggaattacgatacagctttcacataccttgccaatggaagcttccggatgaattgttactgtcacaacagatgctcctgctttttttgctttatttgccataacaatcaaactgtcagtttctcctgaacctgaactgataataagaagatcttttttttcaattgccggtgttgtcggttctcccacaaagaatacttccaaccccaaatgcatcaggcgatttgcaaaccctcttgctacaaacccagaacgtccagctcctgctacaaaaatatgcctagctttaataatctcattagcaaacttttcaagtgaagaagaagaaatatgttttgcattttctgtcaattcttcaagaatttcctccagtataactgaattttccatttctatcatctccttttccattgcctttttattcaggcttttatttttctggaaaatttgaatccggtctgtttaaaccagtcaatataaactgcaatcagaattacaataccctgtacaatatactgccaggaagagtcaataccaagaaggttcataccatttttcagaacaccgattacaattgcaccgataacagttcctgcgatggtaccacgacctccgttcatacttgttccaccaagaacaactgcagaaatcgcatccatttcagctccgtctcccagtgtcatcattgcagtaaaagtacgtcccactgtaaggattcctgctaaagatgcaagtaacgcactatatacaaatacgaaaaatgtaaccttttttacattaataccagaatattcagcagcctgtttattaccaccaactgcataaatatgacggcctaattttgttttattaaggataaaagaagaaactgcaattactgcaacaatacaatataactgaatcggaattccaaagatagtacccattccccaaaaagtatagctgtcatcaagaacagaaattgtctgagcctttgtataaacacgggcaataccacgaccgatattcatcattgcaagagtaacgataaatgccggaatatttgtagaagaaacaatgtaaccgttaataagaccaattacaactccagcaaggattcctccaaggataccaacataaacaggaagtccattccatgaaatgagtcctgcactgatacatcctgaaaccgcaattactgatcctacagaaagatcaattcctgcaagcagaattacgaaagtcattccacatgccagaaacaaattgattgtaatctgtctgactacattaaataagtttgtaactgttgcaaaactgctggttgtaaaacttaatacaacgcaaagaataaccagtcccgcaagaatacccatattagatttaattgtctgtattacagataaatttttccagtttttattttccataatcgtcaccctatttcctttgtcgcaaacgccataattttttcctgattaaattcatttctgttcaatattcctgtggtgtgtccctgattcattaccacaatacgatcgcacatgttgatcagctccggcatctccgaagatatgaaaataattgataaacctgttgctgtcagatcatcaatcagatgataaatatctgattttgtttttacatcaatgcctcttgtcggctcgtccagaataagaattttttctgtgaccagaagccatctgctgataataactttctgctgattacctcctgaaagctttcctatttcctgctctatagaggaatattttgtctgcataacttcatcaacatattttctggcaagttcaatttctttcttcctgttatatcggccttttttcaaaaatttgtccaatatttcaatcgttgcattaaaacgtattccctggatcggataaattcctgactgctttctgtcttccggaacaagtccgattcctgcatttattgcagtttttacatttttaatatcaacttctttattttcaatataaatatgtccgctatccttatgacgaagtccaaaaatacattccattgtttcacttcgtccggatccaaccagtcctgagaacccaagaacctctcctcttctcagttcaaaatcaacattttttacttcttttccagaagcaagtttttctaccttgagaataatatcatctgaatagttttcatgtttctgatacaaatctccaagttttcttccaaccatgagcgccaccagatcatcatgtgtggtctcttttgtaactactgtatcgatatattcaccatctcgcataactgtgatacgatcagtgattgcatccaattcagccattcgatgactaatataaataattccaacattctttgcttttaaagctttgatcgcctcaaaaagagcatctacttcattttctgtcaaagatgaagtcggttcatccataacgattatttttgcgccaaaggaaatagcgcgaataatttctaccatctgctgctgtgcaatatttaaatctcggataaattgagttgatttcagatcaaggtgcatagaatccaaaaatccctgcgccatttcattcattttctttttatcgacagtacctgcttttgtttttggttcctgtccaataaaaatattttctgaaattgtcatatctggaatcaacatcagttcctgatgtataatacgaattccgtgctcttttgcgctctcaacacctgtaatttctacttcttgtccatcaaccagaatctgtccgctgtcttttgtataaactccaccgagaattttaatcaatgtagattttccggcaccattttcacctaagagagcatgaacctcacctgcttccagttccaggtgattgttcttcagcacagaaactccggaaaaagacttacagatatttttcatttccaataaatgtgccataaattttctcctctaaataacaaacatttcccacctttttctatatggggcaaaaatgggtgcagcctacgctgcacccgctcagatttactgccagtcagcgtctaaatattcatcaatatttgaagaatcaattgcaaatgcaggtacatctacttcgaattcttccggtttttcccctgcgataaaagttttagctgccttatagcactctttaccaattgtaatcggggactgagctgctgtcatacgataaatgctgttgtctttagcaattactttcttagcttctggagcaccatcaacaccgtaaacatatacttcttttccagctgtcgtaagtgctgcatatgcccccataccagcctggtcattaatggagaagattgcctttatatctgggttagcctggatgatatcacttgtgattgtctgtcctttttctacagttccctctgcatcaaatgttgccacaacatcaaatccttttccttcaattgtatctaggaatccctgttcacgatcgttgcaggcattgtttgcaggataatcaagaactgcaatttctccaccatccgggaaatcttcaatcattgcttctgcacaaagtgcaccagcctgataattatcagttgcaacataagaaccaaccagatcaagattagatacagaagtatcaaagtttactactggaatccctgcttcgtctaatttctgcagtgcaggttcaattgcatctttgtcaactggatttaaaaatactgctgaaacaccctgtgcaataaagtcttcaataatctgaatctgttttgcgctgtcctgctgagcatccactacaactgttttatttccatcagcttctgcttcttctgtgatggaatctgcaactgttttaaagaaatccgattcacaccaatatgtaactccataagtctgtccaccatcttcagctgcaaaaacacttgccggaattgttgttactgccattgctgctacgcctgctgccatcataagttttgttaccagtcttcttttcattgtaaagtcctcctgattttaaataatttatatagtttttgtctaaagctcatagagagcatgtagattctcttttatgttctcataaaatctgtcataaattttatggaacttctcgtattcctctgcttctttcaaatcgcattcagtaattccatcttcttcaataaaagcatcgcatgcttcctgtatcgaagaataaattccagctccaactccggccagaattgctgcaccgtatgccggtccctcttcctgcttcaatgtatgtacatcgcatttataaagatctgccataatctttctccatacaggacttctgcttccgcctccgcatgcacgcatggacacaacctctgttcccagtttcttcaagatttcattacagtctgcaagggaataaacaacgccttccataattgccctaagcatatgtgcctgtccatgtatgatattcagtccgataaatgcacctctgtatttggaatcaatatgaggtgttctttcgcccatcagaaatggcagataaatcaatctttcgcttcctaacggaatatcttttgtaagttcatttatcttgtcataaaatgatacattttcctcttctgctttctgaatcaaatcccgacagaaattatttttcatccattcaatcgaaagacctgccgactgaggacctcccattgtatgccagcacccaggcactgcacagcagcacaaatgaagtgcaccttcaggaatttcctgatattttttcagatgagtatatacaatacttgaagtacctattgttgtaaaagcctgcccctctcttacaatacctgttccaattgctgcacaggcattatcacttcctccggcaaccacaactgtttctgttgataatccacacttctctgcaattttcggtaaaaggtttccaacaacttccggtgattcatacacatctccaagaagttctctgtctactttcaaaaaatcaagaatttcctgcgaccaacatctgttttttacatctaacatctgcattccactggcatctgatgcatctgtcgcatacttaccagtaagaataaagcggacataatcttttggaagcataatgtgtctgcactttgcaaaaagctccggctcattttctcttatccagaggatctttgctgccgtccatcctgccattggcggattcgctgtgatcttcatccatttttccattggcagttccagcatttcctctacctgcttcgtagctctctggtcacaccagataatggatcttcttataacctgattctcctcattcaacatcacaagtccatgcatctgaccagaaattccaattccccgcacatcttttccattaacctgacctttttcaactacacttttaattgttgaaatcgctgcttctgaccagtctgatggatcctgttctgcccatccgttttcaggctgatacattggatatttgacagacgcttcggctacgatttttccattctgatctaccagaatcgtctttgtcgcactggttcccagatccactccaattacgtatttcatcttattcctccatggctgcctgttgcttcatattggcaatgttctctgcaagatttccattaaataatgcctttcctgaaacaatgatatttgctccggcctttattacttttcctatattcccacagttgatacttccatcaacttctatatctttccactctccggtatctgttgaccgtcttctgatatcttttattttgtcaagtgtatcttcaataaagtgctggccatctcttcccggatgaacggtcataacctgtatcacatctgcaagcttccagatttcttctgtaagaacttctgccgaggtttccggattcagaacaattcctgcacgaattccacattgctttatttcttttaaagtttctgctacattgctgcaggcctcataatgaacagatattacatcagctccagcctcctgcattctttttacaaatcgaacaggttcatttaccatcagatgaacatcaaataccagatcagctacacctttcaatccatgaatcattttcattccacatgccagattcggtacaaagcttccatccattacatctatatgaacatattcagctccggatttttccattgtttttaattgttctcccaggcatttatagtctgcttccagtaaggacggtgctataatgcacattattgatcacctcgtttatattttattacagtcaattactgtctgaattttctgaagttgttttttataacctttgtttattttcgtcgtatatcccagataaagtgcatccagtataaactgatctgaaactcttctggttactttatctcttcccactgtcaggtcatttactgccgtaaataaactgatatctgtatatctgagaagaggagatttattcatttttgtaatactaattgtaactgcacctcgctcttttgcgattttcattgcctctactacatttctggatctaccctcataagagacagctaacgcaacgtcttcacttgtaagattgcctgcagtcatcatctgcagcattacgtcactatgtacggaacacggaatccccaatcttccaaatttcatgtatgccagctgacatactgcaaaggcatctccaacaccgaagaaatgtatctctctggctttaagaagagcatccaatgctttttcataattttcgtcatctgccaaaactaatgtatcactcaacatctgtacattactctgataaacctttttcaaaatcgtcttcatatcgtctgatactttaatatcttctgaatgaatttccattccttctgccaaagctctgatgaaatcctccttcatagaagaatatccatcatatcccattcttttacagaatctgataattgatgcttcactgcttcctgattctcttgcaatctctgcaagcgttaaatgtgtaattgcttccgggttttcaagtaatgcagatgctattgctttctctgctcttggtaacgacggtaacaaaaatctgatgcgaacaaataaatcattcatatggcgtgcactccatttctacttcatttatttaatttcactttgaagttttttgttgattagaatatagcattctgtttcagtgaagtaaatatctataaatatttttgtatatttccacgttttggcgtgtgttttttgttgattacatccaattttttggttgatttgacgtttttacattttatttcacttcattttgaaatttacaaacacttaaatacttcattttatttttgtaatacgaagtataagctataaatatatataatacctgtattcatttctatcacttagattcttttttacctcgacatttttttgaaatatttcagaataatttttagcgatgatccctgctctcttttgagaaacagagctactgactactgacaagaaatatttttacgtaaactccataacatgttatacttactatacaatgctaagataaatatctatctcagcccaataccaggaggattaattcatgaaagcatacgaacgcttattatcttatgtaaaagtattcactccaagcagtgaagaaaccggtacttccccatctacacaatatcagtttgaccttgccagactgctggttcaagaattaaaggaactgggtgtgaaagatgccgatgtagatgaacattgctatgtctatggacatattccggcaaccagaggatatgaatcccgccaaaaactgggctttattgctcacatggatacagtatctgatttctgcgatcatccggttactccggttatcactccgaattatgacggcaaagaccttgcacttggaaccagcggcagaattctctccccgaaaatgttccctcatctctccacattaaaagacagaactcttatcacttctgacggaactaccatactaggcgcagatgataaagccggaattgccgagatcatgacaatgatcgagtccctcaatgacaatactattccacatggtcccctctgtattgcatttaccccggatgaagaaataggaatgggaccagcccattttgatataaaaaaatttggagctgattttgcttatacacttgatggtgatacagaaggtgaaatccagtatgaaaactttaatgctgccaaagcagtagtagaatttaccggtgtaaacgtacatccaggttcttctaagaatacaatggtcaacgcagcacttgttgccatggaattcaattccatgctcccttccgctgacacgccaagagatacagaagactatgaaggatttttccatctctattccataaagggagatgtctcacacgctactctcgaatatatcattcgtgaccacgatgcagcttcttttgatgtccgtaagaagagtatggaacacatcactaaaattttaaatgaaaaatggggaaaaggaactgtctcacttaccatcacagaacagtaccgaaatatgaaagaaatcatcgacacctgcatggaactgatcgagcatgcaactgcagcatgcaaggaatgcaatatctcgccgcttatcaccccgattcgcggaggcacagacggcgcccagttaagctttatgggactcccatgcccgaatctcggaacaggagggcatgcttatcatggaccttatgaacacattactgttgaaggaatggatattgctgtagaggtaggattaaagattatcgaattattttataaataatttcgattacaatatccccttgttgttattttaccgctaaattaatcttaaataattttgcgattaacgtaacaacaaggggattatctataaactcggaatattttttatatttttacatacaaaaaaaccagctaactgttagctggttcctcattgtatcttcaaaactacatacatgttgacatttccttgagattcattcttcctgcgattcttggtcaagccctcacccgattagtaacagtcagctccatgcattactgcacttccacctctgccctatctacctcgtcgtcttcaagggggtttacttctttcgaatgggatatctcatcttaaggggggcttcacgcttagatgccttcagcgtttatcccttccgggcttggctactcggccgtagacttggcagtctaaccgatgcaccagcggcccgtccatcccggtcctctcgtactaaggacagctcctctcagatatcctacgcccacgccggatagggaccgaactgtctcacgacgttctgaacccagctcgcgtaccgctttaatgggcgaacagcccaacccttgggacctactacagccccaggatgcgatgagccgacatcgaggtgccaaaccactccgtcgatgtgaactcttgggagtgataagcctgttatccccagggtagcttttatccgttgagcgatggcattcccacttaataccaccggatcactaagccctactttcgtacctgctccacccgtcggtgtcgcagtcaagctcccttctgcctttgcactcttcgaatggtttccgtccattctgagggaacctttgggcgcctccgataccctttcggaggcgaccgccccagtcaaactccccgtctggcattgtcccaccgccgggtcacggcggctggttagaaacccaatactgcaagggtggtatcccaacagcggctccatggcaactggcgttaccatttctcagcctcccacctatcctgtacatgcaataccgagtcccagtaccagactggagtaaagctccatggggtctttccgtcctggcgcaggtaaccagcatcttcactggtacttcaatttcaccggatgcattgtcgagacagcgctcaaatcattacgcctttcgtgcgggtcggaacttacccgacaaggaatttcgctaccttaggaccgttatagttacggccgccgtttactggggcttaaattcaaagcttcgcgttaccgctaacctctcctcttaaccttccagcaccgggcaggcgtcagcccatatacctcacctttcggtttcgcatagacctgtgtttttgctaaacagttgcttgagcctattctctgcggcctggtttcccaggcaccccttatccctaagttacggggccattttgccgagttccttgacaatgcttcttccgccggccttaggattctctcctcatccacctgtgtcggtttacggtacgggtacggtataaacgatagcggcttttcttgacgcatggctcacggacttcgctactttatttcgctccgcatcacggcttcccattgccacccggatttgccaaagtgactggtaccccgcttgcaccgggctttccattcccagcttccgctttccttacgtgtccccacagttctgtcataccgcagtacaggaatctccacctgttgtccatcggctacgactctcgtcctcgccttaggccccgacttacccagagcagatcagctttactctggaaaccttggatattcggccataaggattctcaccttattctcgctactcattccggcattctctcttccatgcagtccacagctccttacggtactgcttcttcccgcatgcaatgctcctctaccaacctttcggttccttagtttcggtggcgcgtttcagccccggacattttcggcgcaggacctctcgaccagtgagctattacgcactctttgaatggatggctgcttctgagccaacatcctggttgtcttcgaaatcccacatccttttccacttaacgcgcacttggggaccttaactgaaggtctgggctctttcccttttgaccgcccaacttatctcgtgcagtctgactcccgataatcgattacgcggcattcggagtttgatattcttcggtaggctttgacgccccctaggaaattcagtgctctacctccgcaaatctgtatcgaggctagccctaaagctatttcgaggagaaccagctatctccgggttcgattggaatttctcccctatccacacctcatccccacccttttcaacggatgtgggttcggtcctccactacctcttacggcagcttcaacctggacatggatagatcacccggtttcgggtctactcctactgacttaaggccctattaagacttggtttccctacggctccacacctgaagtgcttaaccttgccagtaagcgtaactcgccggaccgttctacaaaaagtacgcggtcgcacatataaagtgcttccacagcttgtagacacagggtttcaggttctctttcactcccctcccggggtccttttcacctttccttcacagtactatgcgctatcggtcactaagtagtatttagccttagggggtggtccccctgatttcccacaaggttccacgtgtctcgtggtactctggatcctgctcagtctcatcagctttcacgtacggggctttcaccctctccggccggctttcccaaaaccgttctgttagcttcaaagaatcttaaatgcagtccgtaaccccggaatgcacgcattccggtttaggctcctccgcgttcgctcgccgctacttacggaatcgagttttctttcttttcctccgggtacttagatgtttcagttccccgggttcccttccatacgttatggattggcgtatggatacatgaggtttgctcatgtgggtttccccattcagacatctccggatcacgggatatttgctcctccccgaagcttatcgcagcttatcacgtctttcatcggctcttagtgccaaggcatccgccctgtgcccttattgcttgacctttcgcttcatcaccctagcgtaggtgatgcggtcgtttgattctcattgtttttgatatgttttgttactgttgataacaattaatatcgatgtcttcctatcttgcgttttatgagatactctcatatctcttaacgttttgtatcaaggatatttgattaactttaatcaaatttcatgtatgcagttttcaaggtacatatctgactgatattttatcagtcatcagaaactttaaatattttatttaaaatctctcatcactggtaaattcagtttttcttttttgatctggcgcccacctgctctcccacaccgtctccagtgcagtaccatcggccgattgggtcttaaccgtcgtgttcgggatgggaacgggtgtgtcccccaaccgcatcggcaccagaaatgtttcagcttgatagctaaacagtaaaacacattctttactctacttcttcttccttagaaaggaggtgatccagccgcaccttccgatacggctaccttgttacgacttcaccccagtcatcggtcccgccttcggcagctccttctttgcagttaggtcactgacttcgggcgttactgactcccatggtgtgacgggcggtgtgtacaagacccgggaacgtattcaccgcggcattctgatccgcgattactagcgattccagcttcgtgtagtcgggttgcagactacagtccgaactgggacgttatttttgggatttgctccatctcacgatctcgcttccctttgtttacgccattgtagcacgtgtgtagcccaaatcataaggggcatgatgatttgacgtcatccccgccttcctccaggttatccctggcagtctccccagagtgcccaccttaaatgctggctactgaggataggggttgcgctcgttgcgggacttaacccaacatctcacgacacgagctgacgacaaccatgcaccacctgtctcgcctgtcccgaaggaaaaatccggttaaggatcggtcaggcggatgtcaagacttggtaaggttcttcgcgttgcttcgaattaaaccacatgctccaccgcttgtgcgggtccccgtcaattcctttgagtttcattcttgcgaacgtactccccaggtggaatacttactgcgtttgcgacggcaccgaagagctttgctccccgacacctagtattcatcgtttacggcgtggactaccagggtatctaatcctgtttgctccccacgctttcgagcctcaacgtcagttaccgtccagtaagccgccttcgccactggtgttcctcctaatatctacgcatttcaccgctacactaggaattccgcttacccctccggcactcaagtatgacagtttccaatgcagtccacaggttgagcccatgcctttcacatcagacttgccacaccgtctacgctccctttacacccagtaaatccggataacgcttgccccctacgtattaccgcggctgctggcacgtagttagccggggcttcttagtcaggtaccgtcactatcttccctgctgatagaagtttacataccgagatacttcttccttcacgcggcgtcgctgcatcagggtttcccccattgtgcaatattccccactgctgcctcccgtaggagtctgggccgtgtctcagtcccaatgtggccgttcaccctctcaggccggctatggatcgtcgccttggtgggccgttaccccaccaactagctaatccaacgcgggtccatcttataccaccggagtttttcacactgagccatgcagctctgtgcgcttatgcggtattagcagccatttctgactgttatccccctgtataaggcaggttacccacgcgttactcacccgtccgccactagaaatagatcaaatccaccgaagtctcaatgaaatatttcccgttcgacttgcatgtgttaagcacgccgccagcgttcatcctgagccaggatcaaactctctgataaaatgtttgattcactcaagataacaactagctatctctcgttttactgtttttggtttttcaaaccgttcttaaaaatgtaaagaattttcgagaatcgtatgtgtttcactgtttagttatcaaggttgtctgtcttgcgacagcttgtttactttatcacatctctttttctttgtcaagaacttttttcaagttttttcaaggtttttcgaactcttccggatttcggaactgttcttctgatctgtgattgtcggctctgttcaagcgacttgattactttaacatattcgttttaagttgtcaagcactttttttaatttcttttttctttcagaaattatcttaaattgtctcttttcaagaaacaattgtttccgacagctcaactaatataacaccgaaagcagtccctgtcaacagttaattttataatttgacaaactttttatattttcaccctaatctccactaaatttccaacagacatccagtctatctgacaccggaattccaaccatcctccccatctatccttcctatatcatgcagcatccatataccatatatacacaacaccccagcttttccttccccttcatactatatatagaaaacttttctattccaccaaactaacaaaccatcattatccttctccctcagccaccagtcacagccaacagccagcagctccaaacaattctcttcggcgacatttgcagggtctttagaaaatcttagcccgggaagatcagcgttattcgcagatcactcactgtctgagccgcttcgcggcgagtttgagttatctgcgaatgcttttagctgatcttcccgggcttagtttttcttaaggcccgaaaccgagccgaagagaattgtttggggctgcgtcccccctttaactgatcttacaaaaacttcactatctcttctgtatctctccttttcggccgtccaggctcttcccccggaactcctaccgcaattaccccaacaacagtctccgtctccggaacagaacaaaattctctgatcttatccgcatccctgatccccataataagagttccatatcccagttcttcagcctttaatatcaggttctcattctgcagcccaagatcataacatccccatccatttccaatttcattatccgctgttccatctttctgaaaacctgctctgttatgtacgaaagtactaaccagcaacactgcattctcacatttccctgcattcatttccggcagacattcccgtctgaactgttccacattcttttcgtccataatacagtaataacgtcctgtttgagagttcttccatgaaggcgcctcctgagctgcttttatcatactcaaaatttcatctttcgtcaccgtatttctctctgcatatttacgaacactccgtctcttttctatcagattctgaaattccatatttttatacctcttctattctttctctttaatcagatagataaaatccatcctatatatctttaataaataataataggatatcctccatctatcgtattatatatcaatgccgcctgatcttccggcagattgatacagccgtgacttccatgtcctgtcttatatcggtttccaccaaatgcagactgccatgatgcatcatgaagtccctgtccataaacaaacggcatccagtattttaccgtttccgcatatccatattcttcactgcttaacgtaaacggacttgccttatatgcaatcggccatgctcctctgtaagtctcacgttccggtgtgggtgcaccgctgacaatatctgtttcagtaaccagcgcaccatctttatacagccataaatgctgtgaatcaagactgacttctatataattgcctgccaggtcatctgttccgtttctcttcatgccactgctgctgtacaccggctctctggatacatcttcaccacttttaagatcttcaagaagctgtgtcagctctgcatcctgatcgatcctgtatccatattcattatcagaaaccgtaacatccgttcccaacgatgtatgaaaagtacgcggcacataaatagtattatatttatttgccatattcgatatgtaatctgcagccgcatccttatcaatgcttataccactatttttaatccgcagccaggaactgatcgtgtctgaatccagcacctgcgtttcctcaccaaacagataagaaactgttgtactgcggtattttttcaacaggctgtttaacttcttcaccttctgcttcatttcacctgattcttcaatatccggctgccggtaaacttcctcgtttaattccatctttacatcagatgtaagcaattctgtttcgaaatctttatccagagtttcctccacataactcaacagcctgttttcatcaatctgatttccggaaacctgtttcaccaacacatatttctgtttctttttactatatcggatatgtgcatccgtaggttctgttctgtctttttcatcaaaatgatccgcagacaatgctgcctgttcctgcgcttcatctctgatgatctgataatcaatcttataatctctctgtgatgcaaaaagtttaaatgtcccgcttctctcctgtttcaatgtttccagtgcacttttcagaatgtcctgatccagactgtatcccagttgttccattgaaacattataaacatcctttccatcttcatgaaatgttattgttttattctgaaatgcttcagatattttctgctgcgcttcttccacagtaagcttcgatacatccaacctgtacacactcactttccttcccagtgtgacagtatccacatgatgtatgtaagcagccagaccgattcccgctgtcacgatcatcacgatacatattacaagaatcactttcagcttctttctatttaaggcttttttctgttccatcctttgttctgctacttcctttcaccttattttagatatctgcaattattttattatatagagagataaaaatcaatttgtaaaatgcagttcgcctgttgttactgttcactccgttctcagtaacgtagccaaaattcattccagatagcaaccgcctgttactttagagcgtttctgaaaaatcattcctgcaatctgcacgccccactttgcggtatattttgtccgagttcggttgtcgtagcccatcaggtttttgagtccataaaaaaatcccacatcacaaggatgcgggattttttacttatgaggttatcatcaggctttattaactgatccgaataattccattttttccttaacagtagctttgattgcttcgaagccaggtgcaagaagtttacgaggatcgtatcctttaccctgctgatcttttccttcttcgatgtatttacgtgtagctgctgcgaaagaaagctggcattctgtgtttacattgattttggatacgccaaggtcgatagctttcttgatcatatctgccgggatacctgtgccaccgtgaagtaccagaggcatctctcctgtcagtttctggatagcatccagagtctcaaagcttaagcctttccagttagccggatattttccatggatgttaccgatacctgctgcaaggaaatcaataccaaggtctgcgatcatcttgcattccttaggatctgcgcattcgcccattcctacaacaccgtcttcttcaccaccgatggagccaacttctgcttccagagacattccgtgttcagcaacgatcttaaccagttctttagtttttgcaacgttttcttcgatcgggtaatgagatccgtcgaacatgatggatgagaatcctgcttcaacgcattttaagcatccttcatagctgccgtggtcaaggtgaagagctacaggaacagtgatgttcagttcttccatcattccgttaaccataccaacaactgttttataacctgtcatatatttaccagcaccttcggatacaccaaggattacaggagagttcagttcctgagctgttaaaaggatagcctttgtccactcaaggttgttgatgttgaactgtccaactgcataatgacctgcttttgcttttttcagcatttctgttgcatttactaacatgataaattcctcctaatctgtagtaactgtgttcattctcagttaccctaatcaatctccgatatggaattacatctatatccagatatggttatattaccagatttctgctttttcgtctactcttttgccaaaaaaataacaaacaaaattccccggaagatatgcaaaaaagtccggcaatacacaatatataataattttctgcaatttataaaaaagtgcttgcattatttaaatatttcatatataataagtttcggtttaaggatggattcccgagtggccaaagggggcagactgtaaatctgttagcaacgctttcgaaggttcgaatccttctccatccatcaaaaggttcagacatttgtctggatctttttttgttatattataaagcggcagccccttcttccgcaagaggctgccgtccgggtcaggcggataagatcatccgcttcacattttgttaatttttatgatgtaagaccactgcgccaaatgccggcattgtgatcttcagaattccggctgctgctgtgtattctttacattcttccgtaaatcccactgcagatgtcatgacaacacgtttcagctttgtatcttccagacggctgattcctgcctgttctaaccgtatctccacttccctgccttcttcctgattatttacgatcacaattatctgttcatcatgagaaaatctcgcataacaaagtccctgataatcattccagagaaatcccagtgatcccgtttttaacacttcatatttcttatggatacggatcattaccctgtggaagtcgatcatctggtaatcctcacgtccccagggataagtacgtctgttatccggatctgtgaatccacagagtcctgcctcatctccgtaatatacagtcggtgcgcccggccaggtcatctggatggtaaccgcctcacgcataactgccggatttactccctcagatgccgcctccggacctgcataggaaattcgtcctaccctgtgattggttctggtcaggaatctggaatggtcatgatttgacaattcattcatggctgtctgaagtgcagacatatgaagcgctctcatgtgcgttttcatagctccgataaaagcctcactgtttcctaacaggtcttcacgatactcgtcactgtgcttctccatacctgtcaggaaccaggtcagcggctccataaatgcgtcatagttcatgactgtatcccattcatcacctttcagccagccttccggattaccgtaatgctctgccaggataatggcatttggattggcagctttcactgccttccggaaatctttccagaactgatggttaaaatcattgctgtgtcccagatccgccgccacatccagtctccaaccgtctacattataaggagcagatacccatttctgtccaacacgaagaatataatcataaagttctctggaaccctcataatttaatttaggcagtgtatcgtgtgcccaccatccatcataggaggtgttatatggccatgcattaggatcattaaaggaaaagaaattacgatagggactgtccgcagaaacataagctcctttcggatatccttcctgattctcataaatacgttctctgtccatccacttattaaaagaaccgcagtgattgaacacaccatccagaatgatcttcattcctcttctgtggatctctgctgtcagtttcgcaaaaagctcattacttgcttccagattcttcttatctgtcacacgtttgatatatttccatgcatgggaattatcatcgtcgtctccaagaaggattcccttattacaatcttctacaatcctgccgtaatgtggatccacataatcataatcctgacagtcatacttatgattacttggagaaacaaaaatcggatttaaataaataacctcgactcccagatcctgcagataatccagtttgttcataattccctgcaggtcaccgccgtaaaattcacgcacacccatcactgccggaatcttattccactgttctacctgtacactcttatctccaatataatgatattctccggtcacaacatcattggtaggatctccgttaagaaaacggtctacataaatctggtacattaccgcacctttggcccaccttggagtatcaaagcccggataaatctcaaaatccatcctgccctcatgtttcatacagactccctgattattgtaataacaggttacccatccatactgtatctcaaaataataacggaagatgtcctctccaatcgtcacctgggcagaataataatcaaatccgttctctgtcccgcaaatctccatctgcacacgctgctcctggcttaccagatatacagaatccacattatttctctgggtacggaatttgatcgttactgtatctcctgcctttggttctgcaggtgttctgtaatattctgttccgtcactgaaaagcgcctctttattaaacacaggacgcatattcaggatgtactgcattcttttttttatatctgctttttcatattccatttccgtccagtcctctctgtcatttatcattttattattttatcctaaaataaaccatctgacaaccatctgtttttcccaaaaatatttagatatccagtgattctgcacaaccattcattctgtcacagtatttcggactgccggattccggcgaagcagatatttcattgctgaaaataacgtgaacagtaatgatattttaagacagtaaaaaagccagcgggataagctggcctttttggagaaggtatttcttcttatggggtgtagcaaaaactatataatgtattggggggtttttacggtttatataataccatgaggcaagagaaaagtgtgcacaaacttcacaaaatttggcacacttttttgtatacattatatactgttgttttctgtttccggattttctgttgtaaaaagtgcttcaaattcgtctctgtgcaccttttccttctcgaggagaagacttgcacacttgtgcagaacatcctcatgttccagaatgatcttctttgcctgatcatgacattcactgataatacggcggatttcttcatcaatggacttggcaacatcctcgctgtaacttctggtatgagccagatctctgccgataaatacctcgtcatcgtcatcaccataacagataagaccaagtttatcagacattccgtatttcataaccatacttctggctgtcgcagttgcacgtttgatgtcattggatgcaccagtcgtaatatccccgaagataatttcctctgctatgcgcccgcctaacagtgtcataatatcctgaagcatttttcctttggtattaaacatctcatcattatccggaagaggcatggtgtaacctgctgctcccattcctgtcgggataatggaaatcgtgtagacaggatccatatccggaagtacatgaaacaggatcgcatgtccggattcatgatacgcggtgatctttttctctttctcagagatcaccttactcttcttctctgcaccgatgcctactttgataaaagcacctttgatatcagactgaaggataaatcctcttccctttctcgctgcttcaatggcagcttcattcagaagattctccagatctgcacctgtaaatcctgctgttgttctggcaatctgaaccagatctacatcctctccaagaggtttgtccttggcatgaacgcggaggatttcctctcttcccttcacatccggacgtcccactgcaaccttacggtcaaaacgtcccggacgcaaaattgcaggatccaggatatccacgcggttagtcgctgccatcacaatgattccctcattcacaccaaagccatccatctctaccagaagctggttcagtgtctgctctctctcatcatgtccgccgcccataccggttccacgctgtcttgcaaccgcatcgatctcatcaatgaaaataatacatggtgcatggcgtttgccttcttcaaaaagatcacgcacacgtgatgcacctacaccgacaaacatttccacaaagtcagaaccggaaatggagaaaaacggaactcccgcttctcctgccactgcctttgccagaagtgtcttaccagttccgggagggcctacaagcagcacgcctttcggaatccttgcgcctacttttgtatatttctgtggagatttcaggaaatctaccacctctaccagatcttccttctcctcctgcagacctgctaccttgtcaaaagtaactttcttattatcatccggagatgacattcttgcgcggctcttgccgaaattcatcatcttggcatttccgccgccaccgccacctgccatctggcggttcatcatcatgatcagaaagatcacaagggcacctgtgagaagaaccggaagcaaggttgtcagaaatacattgtctccgggtacatcctgagttgtaatatcaatatcgtatttattcaacagttcgattgcctgattgacatctgtcacataaaccttcttctgaccggagtcagtagtatctacgatcacagaacctgtaggcacttctctgttctgttgaattgtcgcatcaaccactttgttgtcttcaagagcctgctccagttgcttctgtgtgtaattactctgggaaaccacctggttattcagataaaaataaccggctaccagtgcaatgatcagcaccagatacagaccaattctgcttggctgtttattcacttacttaaatctcctttcagtcttcccccagttccactactcctatgaatggaagattcctgtatttctgtgcatagtccagaccatagccaactacaaactcatccgggatgttaaagcagcaataatcaactcttacatctctgactcttcgctccggtttgtccagcaatgtacacagacggatgctgtttggatttctctgcttcagaatttcgatgagataacttaatgttcttcctgagtcaatgatatcctctacgatcagaacgtcctttccttccagtggctggtcaaggtctttgacgatctttacaacaccgctggacttggtgtcatcaccataactggatacagacataaagtcaagagaaaccggcactgtgattctctttgcaagttcacaggtaaagaatacaccaccttttaatacacagattaaatggatttccttgcctgcataatccttgctgacctttgctgcgatctgcttaatacgggaatctacttcctcttcgctgagtaaaactttgattttctcactcattttcgtttcctccttggtaatttaatactaacaccttcctggtttgggggttaattttatacctctcattcatcctgcttcccaccatccagaggatttcttttccacatgcgatcagcggaatgctgtctctgtatttcgacggaattttctcatcgatcatacagcggttcagcttctttgtgttcccctgcgcattgataaccatataatctcctgtccgtctggtgcgaatatacggattcttttctattttatcataatccatccatttcgtatactttttttcttcaatcttctgaccttcatacaaaaatatttctgccgaaaaaattcccagcggactggtcacagtccccggaattctgattttccattccctgtctgatatattttttccgcaaactgtttttccgttttggatatctgaacctttatgcttttcaccgatcatcccggctgacttctcctctccgtaccgacaaagtcttactccctcgtaatctcttctggcttccatgtgataaggaaggctgatccgtcttccagtctgcatttcataaagttccagaaccttctcatagtgaacagccgccagatccttccgtctgcctgccagctgttccatcgcctgttgtaatgcataaacctgaatgatttgaggctccataaaaaatttttcagtaaagtaatattccttacctttctgaaactcgcccaaaaccaggcagctctgctgcgtaagatattcctctgcctgggaaatccttgccgcagtctctgccatatgtgccgctgcctttccattgacctgctgttccaacataggaagaatatgatgtctgattcggtttctggtatattcatctgacagattggtgctgtcctgaatatgagaaatcttcttttctttcagatactctgcaattttgtcccggtttaagcacagaatcgggcggataatctctccgtctacagggcgcatggtgcatagtccccgcagacctgttcctctgcacagattatgaagcatagtttccgcaagatcctcctgattatgcgctaatgcaatttttatctcactgtcctttctcccacagacggcagcttccctctgaaaagcttcttttcttacaatccttcccgtctcttcctcgcccagcttccactcccggctcaatcccggaacatcataacaataaacagtacatggaatctgccacttccggcatatgttttccacaaagctttggtccctgtccgcttcctttccacgtattccatgatgtatatggaccactctcaatgtaaaatccagttttccctgaagctcctttaaaatgcggagcattgccatagagtcacttccgccggacactcctgccaggaccacatcattttttccgatcatcctgttttgctttatataagcaagaatttctctttccatttttatcctgatttccttttctatcttagtatccgcagcattattttttccacacgcctgccaccagcactgtcatatcatcccgtgcatgataatcgctgtatcccagcacccgttccagtattcccctgccgaaatctttcggtgattcctcgtgaacatccataatgatttctttcatggtttcctcctctttctggtcaggcaatgcatccagtactccatctgtcatcatgatcaggtaatccccatgatacagctttctggtagctgtctcaaaatcaatctgctgtacaagccctgcggccagactttcagaagtaatagattccacccagtgatctcttttgataaatgtagacgctgcccccgccttcagaaaattgcagattcctgtatacaggtccactgcgcagatatccactgtagaaaacataccctcctctcctttgagtaccagagcagaatttaccatctttgctgccgtttcctgggaaaatcctgactccataaactgttccagaagttccacaactgtctcgctctccctgcatgcttccatccctgagcccatgccatccgaaaggcacataacaaacctgccgccatcctcctgtctgcatatataattatctccggaaaccttctcttcttctctggtaagcctggccgttccatagagaacctgatagcttacatcctcagcaaaatgtacagtgtgatattctccgtttacaatacatctgctcccatttacaggtaccatggaaatttcacagtattttgaaagaagctgtgcgatctctgtcatggaaatacactgaccgcttctggcacgcatggtgagaaaaatctgtttacgtcctttcaccttattcatcatccatgccctgcgaaggatcacatggctctttctcagtcccttgcgaagttcttcttcaaactgcggcgttactcgctccaggtcatacagatcactggctacgttctccatgatatgtgagacttccataagctgctgtgctactgccaaccgattctcgatcatacggttatcccacatcaggttctgcctttctttctgaaaattctctgcaaccgtctcataatactgtacggaacggggacatatgcctgtccagtcagcgcggatgcctctgacattttcctcgtttccactctccatggaacgtaccagtgcctccactcctttcaccagttcctgactgtgttctccccagcagatttccctctgatagcatctgctgcatacctttgcatttgtatcctcaatgatctgctcaacctgcctgctgctcagataatctttccgataaggcatcccgtagaaagtatctgccagtttctgaaaagatgccgcatacttctccaccctctctttctgaggatggccctcctgcagagacggcagttcttctgtatccggcagattttctgctaaaatagtttttgccatgtcccgtatgatcagcataatgctgataacgagcatggcaatcatccattcctgcatattctcccctccccttattcattccctgtatatagcagactactgcatttttatcagagaatctctataactgttcaacagtcctctctttcacaaagtactaaacagttacagatattatatggaagggtttctgaaatatctgtcaaacgcagacgaatccttcgcaaaagttttcgacatttattactgctgtttcttaaaaacagtctcattgtccttcacaagtcccagtttctctctggcaacctcttctgcatattcgtctgtctccatatatttctttaatttatcaatttcttctgtacgtgtctgctcatcttcaatctgttgctgaagagtggcggccttagcatcatatcctgtgaggcgttccttaaggtcattactttctagcataagtcctcccagaaggactaaaacaaccagcgcaatcgcaatcattccaagagagttataccctactttcttttttttcttccttttcttagaattacccaatttgccagccttccttttttagcacatttatacgctttataccacagaagtttacatcttttgaccggaaatagcaaccattttatcaaaaatttaataattattacaggaatctccataaatttcgtacagcattttacaaaaatatctcctagaatcctgtggcagatatacgctccggataaaaagcctaaaaccaaaaaaaaacgcaggatcccttcattgcttctgtaaatctccgaaaaaacaaaaaaggcacaacaaagccagtatagaatgtcttccgtcccgacagctttatccgaatgtgcaaaaacattcctgaatgcagccagcagatcataacacaaaaggagaacagcacccacagctattgtccggagcagcagaagtaattcatgatgaataaatgcactcatctctcaccggaacatccttctaaataaggattcatccctgttatctgtattctttgacagataggtaagactgtccacttttccttccagatctacttctcccttttccagatcaagctgcttcacatgaagctgttctccctttattacaagtttccctgcctgtgtaaaaagcaggatttctttttcatcaaaggatttaatatcctttaccccggtaattctcccgttctgacggttttccagcatcaggctgtgagttgaaagtatcttcttctcttccacagacgcctcccggtcacagcctccggaaactatgacctgccaatctattacttatcagtagtttatgtgccggaaaatggaaatagacaataaaatgttaaaaatttatatgttcccactgcacaaatgccaaaagctgcaaattaccatcatgaatcaaagatatttgtacatactctctacatcttcttttttgacagtttcttttacatccagtacttctactttgacattcttacttccgaactggatttcaatagtatctcccgtctttacctgtacagatgccttggcaggcttatcgttgacaagaactcttcctgcatcacatgcttcgtttgccactgtacggcgtttgatcagacgtgacacctttaagtatttatctaatctcatattttactcctgtaaatggatactcacgaattactccgccggagtatcaaaaaaggggaactttcgttcccccggttatcgcctttattatttaccgttaaccatatcttttaatgcttttccagctttgaatttcggtgatttagaagcttcgattttcatagtttcaccagtctgaggatttcttccctcgcgagcagctctttcacttacttcaaatgtaccaaatcctactaactggatttttccgccatttttcagttctttagaaacgacatcaacgaaagatttcagaacgtcttctacgtccttcttggataagtttgtctctttcgccatagctgctactaattctgttttattcatggtgtttcctcctctaatgatctctttcttgtttggtggcatctgccaaaagcgacagagctctatcctctatatatatacctttttccccatattgtcaaggtttttcgtaactgttccgctctgttcagctctgtgttactgaggataatccctgaaacattcctctgcaaaattctcccagatttctctctgtctgataagattctgaagcttttccacatttttctctgaaatccacacctttttgtgtgaataataataatttgccagtttccagtatttttcaggataagtgaaacgtacacgcagatttttccattcttctgccgagattggacggattttatgatattccctgagcatttcccctgccagttccagattccagttatatttctccagtatttttctcataaaacgatacaaatctgctacctgaatatcaaaactccagtgaccaaaatttgtgactgccgtcccaaaatgatcacctttcagcatcagaatattatgctgattatattctccatgacatacctgtccttcccgccatgccctttccctgagatcatcatagtctgtctcgtccagaagctttactgcatactgtgccctctcaagaaactgctccacacttgccagataatttttctcaaatacattggatgctcctttgttccgtataaatttgcgtatcttacgaagctcctgattgtgccggagatattcctccctgagagatctttccctgtattcctccacaggttccattttcattaaaatatgtaaccttgccagtgtccggacactttttaaaatatcttcccgggattttgtgtcacactcttttccttcataccagtgctggagtgtaaacctttgttcagtcttatctttactgaccagactttcctgattattccgcagaaaataatcggtatttataccattttcctgaagtctcagcaaaagctcctgctgtttttccagctttttttctgaaccatgaaactccctcaagatcagaaatccccgggatgtatagcagagcaaagcccctcttgtccttgcagaacggtctgctgtcagctcatactgagccaaggtaccaagtccgtaatcatacaatgacatatccccctcttaatcatcttaattctttctatacatatgaagaaaatccggtggatatacccccggattttagttatttactatattctgatatactgacaattccataaaactgcactatttctcatcaagcaaacccaataatatctctttctggttcttctgtggatcgacaagtactacttccagcagacggttcagcgtttctcctatctcacgacccggcttataaccggcttcaatcagatctttccctgtcactgccagagtttttaaagatacacactgatgttcattaatgatcgtctcataagcctctttcaccttatccagacgttcctgcttctctgcgcgtctgtaatcactctgtgccagcatatctgcctgctgcacttccagataatatgggaagagatcctcaccgatacggttcactgccctgcgcactgcctttgtcgttccatccggtctgtcatcatgccattttaccagacgggttaccttgcggatcgtatcattatcaaatttcagcctgcgcaggatctgtgcagccatcttttctcccgcaatcccatgcatcttgaaatgatctcttccattctcatctgttttccggacaaccggctttccaatatcatgaagcagcatggtaatcctgagaactttatctgcccgtacatgacagagactgtgcaggatatgctcccctactgtgtaacagtggtgcggcgtattctgggatgttgtcatacatgcatcaaactcctgaagaaattcagctgtgatcccggcttcataagccaccctgagataatccggatgaggagacatcagaagcttcacaagctctacctgaatccgctctgcgctgacatgcttcagattcggtgccagaaccttcagtgccttacgagtctcttcttcaatggcaaagcccaactgcgcactgaaacggactgcacgcatgatccgcagtgcatcctctgtaaaacgctccagcggatttcccacacagcggatgatttttctctcaatatcctccagtccgccgaaaaggtccaccagtcctgaagaaggattgtatgccattgcattgatggtaaaatcccggcgtttcaggtcttcctcaaggcttgctgtaaaggtgacctctttgggatgtctgccgtcctcgtactcaccatctacacgataagtcgtgacctcatatccttctttttccataagaacagtcactgttccatgctgcagacctgtatccactgttctgtgaaacaaagccttgacctgctccggctttgcggatgtggtgatgtcccagtcatccgggctccgtcccagaatggaatcacgcacacagccgcctaccacataggcttcatagcctgctttttccagtatatgcaaaattgtttccgcgtttttcggtatttccagaatcatatgaccatccttatcttcttctatttattcttaaccccgaaaaccggcactcagatatctctgctgccggttttctttattttcttattgattagtatgctcttccccagtaaaccatcttcttggcaggttttccacagcatacgcagacatcacttaagtgttcctgctcaaacggcatacatctggatgtagcctgaacatcctctttgatcttgtcctcacatgcgcggtcaccgcaccacatagcttttacgaagcctggtttgttaacaatagtatctttgaattcttcatagtttgtagcaacataagtatgggaatctctgtgcttacgtgcacgctccagcatatctttctggattgtttccaggatttcctgtactttctccacaagctcatcaaatgtaacagtatatttctctcttgtatcacgacggcagatgacagcctgaccattctcgatatccttcgggccgcactcgatacggatcgggataccacgcatttcctgctctgcgaatttgaatcccgggctcttgtctgtgtcgtctacttttacgcggactcctgctgcttttaatgctgcaaacatctcatctgctttctcaagaacgccctcttttctctgctggatcgggatgatcactgcctgtacaggagcgattctcggaggcagtaccagaccgctgttatcaccatgtaccatgatgattgcaccgatcatacgtgttgtcatgccccaggatgtctgatgtacatactgaagtttattttctttatctgtatactggatgccgaatgctcttgcaaatccatcgccaaagttatggcttgtaccggactgaagagcttttccatcatgcatcagggattcaattgtataagtagcttctgcaccggagaatttctccttgtctgttttctgtcccttgataaccgggattgcaagtacttcctcacagaaatctgcatacagattcagcatctggatagtacgctcttctgcttcctcggctgtagcatgagctgtatggccttcctgccataagaactcacgtgaacgaaggaacggacgtgttgtcttttcccaacgcactacagagcaccactgattgtataccttcggcaggtctctgtgagactggatttcttttgcatagaaatcacagaataatgtctctgatgtaggacgtacacacagacgctcctgaagcggatccagaccaccatgagttacccatgcaacctcaggtgcaaatccttctacatgatctttctctttctgaagaagagattccggaataaagattggcatgtacacgttctgtacgcctgtctctttaaatcttctgtccagttcgtgctggatattttcccagatcgcatatcctgcaggtttaattgccatgcatcctttaacgctggtataaccgcagagttcagctttctttacaacgtcggtataccactgggcgaaatcgtcttccatggatgtgatggcttctaccagtttcttgttgtttgccatgattacttctcctttttatgtgattgtgttgatcctgacagtgcatcaggatatagtcgcggcggaatgcatattcttcttatttttcttctataaataaatttccttatctgcttcacagtacaaaaatctgcttttttataatccggcaaaatctgtcatattataaaaaacgaaaaaaagaagcccagcatccctcacaagggaccgaaaggcttcggcggtaccaccctaattagcactgtgcccaaatgcctgcacattgctcgctcttcttccgataacgcaggaaaaacgccgtacttcaattgtacggagctccgaggccggttccataattcgcgcacagaatccttccaccactgtttcgcagccaaacagctgttcctccgggactcttctctgggattgctccttatgtactattctcttcatcgctatatatatttcgcatttgattatattctatttgaaataaattgatgtgtcaagagtaaaatcagtttactattcactctgttctcagtaatggttactgttcacacaccactatcctgcgaggtgttttggcatgaatatgccaaaatcacacttctattgtaatcttacgtcctgtccggttatatttataataacggaccccggctgcatccagcattctcttggaagcgatcactgccggcgtgtctgcatatttatcacagtcatagacaatcgtcttaatacctgcctgaataattgccttggcacattcattacatggaaaaagagaaacataaagctttgcaccttccagacttcctcccctgtaattaagaatcgcattcaattcactatgggtcacataaaaatatttcgtatgaagactgtcaccctctcttgcccatggaaattcatcatctgaacagccctttggaaaaccattataacccatggacaggattttattatcctcactcacaatacaggcacctacctgagaattcggatccttggaacgcatccctgacatcatggcaactcccataaaatattcatcccatgataaataatctgtgcgtttatgatttacatccattttccaaacctccccttcacatacttcaccattcacctgcttcataaaagcatcacattgtccattactgtgaacggagcgaacagtaaccattgtctgcttataactgacacagccagaacttcacactttactctacagcaatccccgttcatcatacatgtgagagaatcgctataatcatgcaggctctggctgttttatcagctttcttattttatggcttattcagtctctatctgattaattcttctgatatgtctctcatcgttggaaaacggtgtattcaaaaatgtatccacaatcttcaatgccagcccaggtcctaccactcttccgccaagtgcaaggatattggcatcattgtgaagtcttgtagcctctgctgtaaaacaatctgtgcagactgcagctctgattcctttaaacttgtttgctgtaatggaaattccgatacctgttccgcagatcaggattcccttctcacattcgccgtcaagaattgcatgtgcaaccttctttgcatatatcggataatctacggaatccagactgtcacatccataatctttatattcaattcctttctcatccagatacttcttgatctcctgttttaattcatatccaccgtgatcacatcctagagctatcattaatcttcctcctgaaattaatttattttctttacctcttcagcagactatttaaatgaatcttcattatccatctggccattactgctgataagattatatagtcaggcatatatctgcttcactacctgattatatcataccacctgtatgatcttatgtcccgctgctttcagcagacggttcataatggcctgtcccattcttggtgtataaaacgcttctgaataaatagacctgactgcactctggtcaaagtcccgcaacacttcatacagatgatgcgctatcgtctcttcttccttccggcttccaatgctgactaccagaccttccggatatctgtcctttgtctcgtccgttgcaataattccaacctgctcgccgtgtgctttcgcctccgcagccagctcattgatcttcttcacaacagcttcctccggtccctcaacaattgccagatctgccttcggtgcataatggcgatatttcatacccggtgctttcggacgcactttgctgtcagccgcaatcagccccttgtccatccttacatcccctagagtctcctgaagcatctccagagaaatataacccggacgtaaaaccaccggcacatcctcagtaaaatcaacgatcgtagactcaagaccgattcccacctggcctccgtcaatgatcatctcaatcgcttcaccaagatcctcctctacatgctgtgcagtggtcggactgggtctgcctgaagtgttggcactgggtgctgccacatagccgccggcagccttgatcagctcctgtgcaatcctgtcgctcggaaaccgaaccgccacactgtccagaccacccgtagtctcctgtggtacaagatccgacttcggaagaatcatagtcagcggacccggccagtacttctctgccaggatcttcgccttctccggaacctccgctacaatcggagccagcttatcaaactctgcaatatgcacgatcagcggattatccgaaggtcttcctttcgccgcataaattttcatagaagcctgcggattcaacgcatcccctccaagaccatacacagtctccgtaggaaatgcaaccagaccaccctgtttcaaaatatctccaccacgccggatagcctccatatcaagattatccgctgtcatggatacaacttctgctctcattaaattcctgctttcttatctgttctgtattttatataacaatattcctcttactttattttcgttttgtatgttcatgatacaacagagataaaaattcgtcaaatgtttcttctttggcaaacagatattctccattatccaaccgaacaaataacaagctgacagaaaatatttctcctgtcagctcgtacatcaatctcttaatttatcaagcaatacatataccctttcttttgtgagttctgtggccttaacttctgcttatactgcttacctgaaacaagattataatttgtgtataaatcaaaaagcattatctgatcgcattcatacaatatttatagattcttttataggtacgtgtagaatagtgaacgccgtcatctatatttcccttaaactcattgtatgtactgtaaccattcttcatcagatatttataggtatctatccattgaaatctcttatttaacctgctctgcaatctgtcattaaagtaacgtaactgcgcttcttttcgagttggtttcattgctgtatttaccggattcacagacatataaaacaatctgcagtcactttcaagttcctctgcaagagtgttcatacgcgcaagatatgcatttgcctcgcctttataatcaaccccattcccggaattatgactcgaaagatcattcacaccaagattaaaaataactgctacgggcttatctgaatctgactgcagacgggcaatttcacttctcattactctctctcctgctgtttcaaaccagctcagtccctcccctgtcttacacacaaatgatacttttgcaactgcatcctttccatattcctgaagaagagttttctgcataaaatacgttctggaatctcccacaaaaataattccggaatactccgacagctgagctgccagattattgacctgaatatccggctcctgttgccagttatacataactgcatataaatgggttttcttccttacctgtatcacctgtcccgcctgatactgcggattctgagtctgatccggcttcgtgctccatccaagaaaagtatatccggtctcgttctttattgcaggaagtgtcacttttccattactgtctgcttttcttattatcgtagacccatctgcctgatggaaaataaccaccttctgagaagcagatgaaatcgctcctgttccctccgacggtgccagtgattcatcctttttattatccgaatatgtaaaagatgtgaagcttgtggttcctttttccgcatcgtaaacccttactttgctggttttcgcaaaagctgtttgacaaaaacatgaactacagcaaattgctcctgtcaacatcataatcatcattttcctgctataatgtctaacctgaattattcgattcctcattttaaaactcctttcctgtcatgtaaatattcacaatcctcattttctcctactacttatacagtgtcatcttttcatttttccactgtagcaacatatttttcttatatatattgcacatacattatcataatacaatcgtaatccatatctgtaaattttgcttttcttctctttacctcctaacaattactctcccaaccattccagccaataaccagcgtaaaaaaatatttcatttcctgtgcatttgcagggttcttagatattcttagccggcaagaatctgtgttatgagccgaccgtctcacgtgtctgagcgaagtttgcaacggagcgagtttgagagggcggctcatgcctttagcagatttttggcggcttagaatatcttagagcccgaaaccgcacaggaaatgaaatatttttttacgcgtcccttttgatcatcaaagattacccgcaatattctttacaaaaacgcaaaaaatggcgacacaaactgccgccatttttcgccctcttacttattaactttaagaatataagtactatacacctcatcctggaacacaacttctccaagcgaattcagcacctcttcattcagtgcatccccatatttctcccgttctttcgatccgacaaaaatataataaacatcatactcttccagcagttccttcacatactccacatccaaagaaatataaatactctcaatatccgcactcttctcattcagatccgcagtatcatctctccacagccactcatgcacataccatcccagcacagtcggaagcccggtcatagcagaaacacgctcataaccactatagctgtccccgttcgcctcaagcacaaccggtgaccctttcacattcttcttcagccatttaataccagccacatcctctgtgaaatcatttgacaggaaagatgtcgcattcaatcctttatattcagaaggctcccatacctttccaaaccacgcatacacactgtttccaaaataaccaaaggtccagcaaagcagtaccagaccgatcactgacacaaccttaaacactttcttacgtgtagccaccagcatacggaaaataccatatcccatggtcatcccaaacagcatatacgcctgataagtcagcttaaacatagtattcgccctggcgtttccattttcgtaaatatctcttacataaaccaactccggaatcacgatcagcccgattgcacagagtcccatgacaatcgcaaacagatccggcacagagattgctttcatcagtttatatggacttctgttcgcaccaccacgaagcttctcccagatgatacagatgatcagcagaactgtcagaaccacaggcagtccccacaaaatcagcagctgatggatcatagaatgattctgcgcaattcccacacctttaaacatactgtcaaactgcaaagtaaacggcagagaaacaacgtatgagatcacaatgatctccactgcctgaaccgcagtcactgccagaatcctcttcactttaccatcaaactgaacgatattggtaaacagcaccactccaccggtcaccacgaaataaataataaaatcccagaaattcgtaaaccggaacataccgatcatcactgcagccagcaggatatgcggaatcaacagctgttttttccagaactgtttccggcccggcttcatgatcactgcttctctcatccgcacacttcgcatccacgcataaagaagtcccaccagaaacagcacaaacattacatttaccacatgggcatggagatctcccagcacaaaggaataacatggaaattcatggattgtcttgtccggcacatccggattgtatccaatataacgggtcgcatccgggaaccagtagctgtccgcttcttttccctgcagcttctggagccatggaatgatcttactgtaaaccacataatgcatatttcccgcaattgatacagaaagtcctgctatgatcccggacacagccggcacacagcgtttctttcctgtcaggcttcccttaagcatgtccacagacatctggtgaaccagtgaaaacggaagcacaaacgcaaatgcagccacaaaagtacgcatcagattgtaagtgagttctactttactgccagtcagcttcgtcagaaatactgcaaaatactgtccgccataataataattgatcgtaccttctgaataccacagatctcgtgcaggaagtgtcgtacttctcatcatggcttccatgaaaccataatccataaatttctcagttcctccgtatgcctgcggacggaatcctgcgaaataagtccacatcaggaaaaatgcaaagaacagaatttcctctccgtaaatcagatttacctttccggacggaaagcagtcaattccattttttccctgaaaatgatataaaaccccacagccaacagcacatacaacagacacaccgatacatgtcgctacagtaaatggcagtatcttcgcagttaccagaaaccacgtaagaaaacctgtcacagtaatcgccagcacttttgaaaacatccagcctttgtcctcaaatccggcaaacagtctccctgtcacaggcatggcaaccattcccatcagaaatgccaacagccaccaggtccagaatgtccatacatctccctttaacagaaatgcagacagccctgcaagagctgctgcaagaagcactctcggtgcccatttcttcatccgtacgtcctccttaatcatttataaaatcattgtggttactataatcttacacattctctcttatctctgtaaatctgtgatcacccggctcataatcataaatccggagtaatccccgtaataatgcatttgaggattattctgttgttttatagatccgtatccgtccatcctgagtctcataaaccttttcatatgctgcagcaattgtctcctcacgacattcctgctgttcaaattccgaaccttcttcaaacaggatatatgttattttttcctgttgtactgtttttttcaatgtttcactgtcagatgtggtgtatatcgttacagcctgtgcagccctgtaattcgtatcatagcctgcagaccatgcgtaatatggccatccacagtaaagcatagctccggacatcgtcacttcattcatgctgtactcaggagtaagtaaaagatcgtttttctccagattctcctccaaccattgggtcagctcgctgttcatatttacagtcacacgtctgcccggaccatttccctttatgatcaccacaaagtcataaatcccggtcacactcagagatatcaccaatactattgccagtatctttcccatagttttctgtatcccggactgcccatttctcccattccaaagactgcatactgcccatgcccagaaaatcgtcagaaacgcatatgatatcatgatatatttatggtttacattaatatccggtgtcatcagaagcacaaaagcaaaaatcaccggaaacaggaaactcacaaggattgctctctcccgtcttctcataaaccataccattagtaccagcccaagaaaaaaaactccgctcatccagaacagatatttcacaactcccgggacagtcttatcctctgccagaaatcccagataaatctgaggactcatagcacttccaacaacaaaaatctttgactgaagccaggaaaagaagatggatacccccgccatgacagcgtaatccacttttccatccgagaaaatcgcaaagccgcacaaaatcagcagaccaccgatcactgctgccccattccagaacgcacacagacccagaaacattcccataagcagtgcctgatccagatttctgcttttccatccttccttcgaaaagattctgttttttatccagagtattcccttctcttcatgtgccgtcccggcttccagccagtccataaacagatatagcgccaaagtcaccatcagaagtccaaatgccagatgcctctgattaagataaacattaaagttccacaatccccagttctcattgacagtatatccgataaaggaagtattttcttccagggtttccacaagattccctgcctggatatgctcccatacaaatctgaaaaaagccattccgcttctgaaaaagaacagaaacaatgccagtacaccgcagcacattttgcctgtgatcctaagtgcaagctgatataacagcataagaaatcccacaagcgacaaggtacttacgatattataggcaaagtccatacgcattccaagatattccagatttcctgtgagaaactgaaacataaaatgatactttacatctgcacctccataatgaggatactgtgtgggaaaattatttcctgcagaaaaagaacgcatcattgccgtatgtggtgcataatctccatacacagtcaggccggaatacaggattccgtcttttatatagaatacataaaacatcatatatgtaataaatacagtcagcagaccaaagagtaatatttccttttttaatctgcgcttatcctgtgttttatcaatattccatatcctgtaacttccctgttttctgtatttctgtacgctgagcagtatcataataactgctgcacctgtcatcccgataatatttccatacaaaagtggattttcagcttttcccacaacactgaaaaaccaggaaataatatataccatccaggtcagtaaaagtgttccgactccaaaagaagccggaagcatgagccagatacgattaatacctgacacactccttccctctcctgtcagcattttcgatgcttcacagcccagcattcctgccagaagcagataaataattccaagcataatttctccctgtacatttccccgccatgcagatattcctatcctcccgggggattttatcaaacaagtatcagtatagcaaaaatccctacttattaaaagcaagttcacataaattaaacattttaaattttttgttgcttcagatattgttcaatccctttcactatagcttccactattttattctgatattcttctttgcagagaagtccggcctcttccggatttgtaagaaaaccacactctacaatattcaaaacactttcacttctttttaacagataataggttttattaccttttgccacacgagggcgttttactttcagtcccagattcagttcttcctggataaactctgccagattctttccccggacagaatcttcataataaaacacctgtggaccgcatacagacgaatcctgatagctgttctgatgaacacttatgcacagcacaggtctgtatttctttatcatagcaatcctgcactgcatatcctgtgctttctgatttctgctgtcctcctcataaaggcccttatcttcttcccttgtcatgattacagaaaatccttgtttttccagagaatcctttaattttacggcaatctgaagatttatccccttttcttccagtccgttcactccgatcattcccggatccgctccaccatgtcctgcatctaccagaatgatttttgaattttctgttgaactcatagtctctgaaacttcagctgcctgttttgacagaatgagaaaactgacaagaagcagacaccctaacattaattccagtccatattttttcaaactaaaaacacctcctgagacatcttttacagtctacgggaaaattcactgttcctgtagactggctatagcaattccataaaataatgcaatcagtatttcataaaattctatattaatatatgtttcagaagatgtttttatagcctgctgatgcagaacttttaattattcagattgtccgagattacctgccagattccgttgttttcaaatccaagcttccatgcagaaactcctgcaaggtcatatttggataccagcttcactttctctgcaactgactgagcatcctcaagccagatctgataggtagaattatctatatcatattttccataattctgggaagtggtcttatcccagtaggtttccacattattatctgcaattgtctgctgcgcctgatccataccgattgcttcactggttacatttccccctgtggtcctccacagtctggtataaaacggaatggcattgatcacacgtttagccggaacctctttcagtgtatcctggattccctgttccacccatggaagagatgccacagaaccggcttcagatcctacataatgctcgtcatatcccatgatgatcacataatctacaacccttccctgctcagcccggtcataatggcttgtaaaatcctcaggaaccggattatccactgaaagaaccaaattattcttatgacactctatggaaagttctctcagaaattccagaaaatgagttcccacatcctcgctgagagattcaaaatccacattaatgccatccattcccacatcttgggctgcctggatcagctgactgataatattctgtctcgccgcagtgctggaaagtgtttccgttgtacttacttcctgtgtaaagttgtcgatcagtccccatacctgaagccccttttcatgagcctgtgatacataatctgcacttgcgatgcttgcaatgtttcctgaagtatctgtcagatagaaccaggtaggcgagatcacattcacacctgtcatatttgctgtcgcatccgcaaaataagcattggcatctgtggaagtcacctgatgccataccatattgaccttgctgtccatagtaagataggagtactcttccttcttaaagcttcgttcaaattttgtcttctctgcttctcccactttcttcttatctatataaccgatatatccgtcatccgtagctacctgatcccagttctccaattcttcgataagacgaagctttgtacctttctttacagaagtaagaatagccgatttaattccaccgcggtaacgtatgcttgtattcttcttaactgtgactgtttttacatttttgaatttatactgtatggcaatcctgtatggatcttttgtgatgtatgcatcaagatctgtaaattcctgcacataagtaagattcagatacactttgtcatctttcacccataccttatctcctgcctcagatgatgcactcgcagaagtcagctccgaaggtgttgcataaagtatctgctgattggcagaatcccagtaatatctctggttcagataagtattcaccacatccagtggtaaatagactctgtctccgtccaccagaccacgttcttccagtttctcagttccaatgaccagggcaatctccccatctgtcatttctccataatattcattcagatccattttctcagaagatggtatgtacttcattactacatgagtgacaattccaagaatcgcaacaagaatgaccaaaacggcaactgcgataactggtttatactttttattcatagtatttttcctttcagtaaatattgtgttaccggaaacaaagcagacagtaacacgattgctattgatacatcagctcacagaaaggtatttcatatagttattttgagtatgatgtaccagtattattaactgtatcggtaacttgatgatactggcttaagtataccataaaatattacaattgtattgcaaaatcgtatttttcacaaatttttaagatatgcgtaattatattcttatgctgcccgaaggcattatgaacatcggggggactggttcagaatctgttcgggcagctttctcttttgttatttttctttgacgaaatcaaaatccacacgagcgatccgtcctttttcatcttcaacgtaatcacgcatgtatccaccaccttctgcaatctgacaggcttttgcaattgttttcggattactgagtataccattcagatacagagaaattccctgttcacgataactcttcaattctttttccagtggtttacgcatgctctttttggttgcccgtgatatattttccgtaagcttacctcccttctttcataagattttttagaaagcaccttatcggctgttgaaaaaacaatatccctgcacctgttttatcgttactgtgaacggagtgaacagtaacgtttcaacttcttatcatcatggaaattttacctgtacattgccacagcaggaacgctgcatgaaaaacggcaatgaagtttagaaataaaagatcactttggttaatgtttcagatcttcgcttatgtgaatcgcaggtttactgcttcttctgttttcattatatccatctggtaaacagatgcaagtgtttttcttcatttatgtatttttttctgttttgtttctaaaaatttaatattttggttgattacttatctttacattttgcagttctgtgttatataatatagtgtataaaattttataaattcacagtcagacaatagaatttttgaagttacttacagcaattttccaaagacagcgcatctatggcaatcctttaaaattgctgttcaaaaaaacaatagtaacttttaatttatccgtaattgtccgcagctttcaaaagttaaattttcattatcagaaacacttttaatggattttcacaggcaattatgaagctgccagataattcaatgttattcagaataggatgtgacaacatgaagatagaaaagatcaacgacaaccagatacgctgcacactgacaagagaagacctggagaaccatcagatccgtatcagtgaactggcttacggcactgagaaagccaagaaacttttccgcgatatgatgcagcaggcacagatacagtttggttttgaggcagataatattccattaatgatcgaggccatcccggtgagtaccgagagcatcatcctgatcattaccaaagtagaggatcctgaagaactggatacccgtttctccaaatttgctccattcagagggaatgataagacagatactcttcagcttgacggtgcagacaatattattgatatcttccagaagctttacgaagcaaagatgaagagtactcagacaaaagatggcaaatctgctcagaataccggagcaaaggaaaatgacgatactcaggttcctgatgtaaatcttatccgtctctatgagttcgacacactggacgatgtgattgcggccgcccatggactgaacggctattttaccggtgcaaacaccctgtacaaagatccggccgatgagctttacaaactggtacttcaccagtcatcactttctccggaggattttaacagggtatgtaatattcttacggaatatggacagggaaaggctttctctctttcaggagaagcttatctgacagaacatggagaactgatttccgattctgcccttcagcagctgattcaactgtaataattttcataattaaaagagcattcagttttcatctggaagctcttttcttataccatagtaaattacagatttctcaaaaaaggatgtcctgaacttattcagaacatcctttttacatgtcagtctatgacaattcaacaattgtcatagtccgtcatatgattacctttcaggaagattattctccaagaaaatcattaatctggttaaccagtacatcaacatccagtccatgaaccatagctgcttcttcgagagattccatctgggaagatgggcatccaaggcaatgcattcctgctctcataagaatcggtgcgatatttgcatcaatctgaagaagctgaccgatcagcatgtcttttgatactttagccattgtatatttcctccttaatttttcttcatactactcagcttttatagcttctgatattataatactattttactctggaatcaactgcaaacttttaattttatcgttcctccctgaaatacggaagtcccagcgcagcaggcggctggtgttcctttttctttcggaagcttgtgaataccagtacgataatcgttaccacataaggcagtgctttaaatacttcctgcatgcttcgtccaagtcccgggatataaagatacagaatataaagagctccgaacaggaatgctccccagattgcattcagtggtttccataatgcaaagattaccagtgcaacagcaagccagccacgatctccaaaaccattgtctgtccaggttcctcctgaatattccattacgaaatagagtccgcccagacctgccagacctgcaccgatacaggttgacagatatttatatttgataacattgatacctgctgcatctgcagttcccggattttcaccgattgccctgagattcaatcccgctcttgtcttgaacagaaaaaacgataacaggactgctataataatacagagatatgtaaggaaaccataattaaataaaatacctccgataaccggaatcttagacaatcccgggatttttgccgtataggcacttcctgttacttttacggaaatctgtcctacaccgcctgcaagcttggaaatagaaccgccaaagaagttaccaaaacctgtaccaaaaatggtaagtgcaagacctgttacattctgatttacacgaagtgtgatagtcaggatactgtagatcagaccaccgattgcagcacatgcaaacgcacacaaaaacgatatcagtacacccacaagtgcattgggatcaggattatccttctcatagaggaaagctcccatcaaacctgaaatgccgcccatatacataattcccggaataccaagattcaggttaccggatttctctgtcataatctcaccaagcgccccatacagaatacagatgccctggacaattgctttttgaataaaaactatcagtacactcattgccgctacctcctatttctttgcacgctttactctgtagttgataaagaattctgcaccgatcaggaaaaacagaatgattcccagaagaacattggaagcattctcattcagtccatactgtgttgcaatctgtacggcaccctggtccataaatacgatgccaaaggaaactgcaaccataataaatgtattaaacttggaaagccatgcgacaatgatcgcagtaaatccacgaccgcctgctgttgcagtggaaatcgtatggctggctccgctgacaataacaaaacctgcgataccacagattgcaccggagattgccattgtacggataataacctttttcacctggataccggcatatctggcagtattctcgctctcacctactactgcgatctcatagccctgcttgcagtatttcagataaatgaacattcccactgtcagaatcaggacaatgactacattccagccatatttctgtccgaacagttccggaagccatccgccttttgtagcctgattgatgattccgactgtattggaacctttcggattttcccagaatacaatacaataagttactacctgcatggcaacataattcaacatcagagtaaacaatgtctcatttgtattccagtttgctttaaatacagccgggatcattccccagatcattccgccaagtgcacttgccacaaacattacgatcaggagtaaccctgtaggcatcttatctcctgcatagatcatgacggcagcagagcaggcaccaccgatcaggatctgaccttctgcaccgatgttccagaatttcattttaaatgcaggtgccagaccaatggaaatacacagcagtaccattgtatctcgtatggtctgccacagacggcgttccgaacccattgctccatcccagattgccttatagacatccaccggattcatctttaccagggcaacgatcaccgctccgcacacgatcagtgcaaggatcaatgcaatgaaacggatcagaagacgttcctgccatctggctttgtttcttcttttacttacctgtaagaaaggttctttcttcatgcctgtgtccctcctttttcatgcttcgtcataagaagcccgatttcttctttcgttgcagttcttccatcctcaattccgctgattttacctccgcagaacactgcaatcctgtcacacagttcaagaactacatcaagatcctcaataacacagactactgcaaccccttttttcttctgttcattcagaagacggtagatcacatgggaggtattgacatccacccctcgagtcgggaaagctaccagaagcactttcggattctgggcgatttctcttcctaccagaaccttctgtacatttcctcctgacatctgacggacaggtgcagaaatacttggagtcatgacttcaagctgttctttaatttttaatgccagtgcctttggaccttttcgatccaggaatggacttttgccattgcgatagcttctgagcatcatattatcggtcatatccatatcgcccacaagccccataccaatacggtcttccggaacaaaagcaaggctgatccctgctttattaatggagatagaatccattcctgcaagctctgttccttttccattgtcatcaagcagggtgatcgaaccgctctctattgcctggagtcctgcaattgcctccagaaattctttctggccgcttccggaaatgccggcaatacccagaatctctcctgcatttactgtcagatcaacatcatccagagtttttacctcttctttgtttttacagttcagacctttgaccactaatcgtttctttacattctccggttcaggacggtcgatattgagatctactctgccgcctaccatcatctctgacagactctgtgcatttgcctgagctgtttctactgtatcaatatactttccttttctgaggattgccacacggtctgataacgccagaacttcctggagtttgtgcgtgatgatcataatggaacatccatcttttctcatatttctcaaaatatcgaataaccggtcagactcctgtggtgtcagaactgcggtcggctcatccaggatcagaatcctcgcgccacggtagagcatctttatgatctcaactgtctgcttctgggaaacggacatttcgtagatcttctgtgacagatccaattcaaagccatatttatctgccagcttctgaatatcctctgtgatcctcttcatgtccagctttccctttcccggaagtcccagaacaatattctctgctactgtcagtacatctaccagtttaaaatgctgatgtaccataccgattcccagttcataggaatctttcggtgaacggatcgttacttcttttccatttacaaaaatatgtccttcatccggataataaattccatagatcatattcatcagagttgtctttccgcttccgttttcccccagaattgcaagaatctccgattttctcagtgtgagatctacatgatcattcgcctggaccgaaccaaaactcttggaaatatctctaagttcaagtgcatagttttctcccactatcgtttcctccttttatctaatgatatccaatctacagtaaaagtcctgtctctttgactgccgatatcatttaatcctacttctgaattatggaattgctctcctgtatactccataatacagcaaaagaaaccttctgtcagaagactttaagacttcttttgcacgtacgatatgaaaacagcagagctgccgcccgggcagccctgctgtcgtaaattgctccgcgctttgcagctccagcaatttttttattctgtaatagatgtaattccatcaatcgcaatatcaaatgcaggtgcggaaccatattcagattcatggaagtatccgtcagaaatatactctgtatcacccttcttataagtatcaagttctttgccgtctactgtaaatgcagatgtatcaaatacatgaagggatccatcaatgagcgcatcttccacttctttgaccttttcttctgtaccctctgctacagttttgtcgttgagagctgtgatcttatctgcaccttctgcaaatcctttacaccagtcagtatcaattgctgtgccgtcaagcatacactgtactgcgtatgtataatatacgccccagtccatagatgcagaagtaagtgctgtgttaggagcaacagatgtcatatcaatattataacctacacatggaactcctgctgcttcgcatgctgtaggagcacctgttgtatctgcatgctggctgatcagtacacagccgtcagagatcagagcatctgcgcactctttctcaaggtcaaagcttgcccagctgtttgtatattttacttccattgttacagacgggcatacgctcttcgcgccaagatagaaagctgtataaccggagataacctctgcgtatgggaatgcacctacataacccatcttgcatgcgtcttcttttactgtgccgtcctcgatcatttcattcagtttcagacctgcaactacacctgacacgtaacgtgcttcgtaaatatttgtaaaatagttatgcatattggaaagtccgctggatgcagcctgtgttcctgttgcatgacagaactgaacctccggatattcccctgctgcttccagtatataagtctcatgtccaaagctgtttgcaaagatgatctgacatccctgatctgcaaggtctgctgccgcatcatagcatccttcatcttcaccgatgagagttttctcaataatctgagaatcgtcaagaccaagcttctcttccatctcatcaattcctttcatatgagcagccgtgtaaccttcattctcatcaccgatatagatcactcctactttcaggtcctcttttgcaatccctttaccttcatcttctgcaaataccggtgcactcatggaaaccgccattactgctgcaagtccaattgccaatgctttcttcattcttcattcctccattctttctatttgttttctgattcctgctacggaacaaaagaggcacaactttctgtgttatgcctccttgcaagtatctttactataaccgtttatgtctgaattgtcaataaattcagcaaaaacgcactttctttttgatactcttatttttttttgtatattaacagactattttccatcatacaaatgcctgtattttggcaggataatttttctgctcggacagacattcacatgtccgtcagctatttgtaatctgcaggtaaagtaagcaaatgctaacttaatattattttataatgtatctgattttatacttgtaattcagacaaagatatattaaaatgtatgcagaaccccgaaaggggcctaaaacgttattacgataaggaggattctaattatggcatatgtaatttcagacgaatgtgtaagctgtggaacatgcgaaagcgaatgtcctgcagaagctatctctcagggagatgagcattatgtaatcgacgctgatgcatgcttagactgcggaacatgtgcagatgcatgtccaacagaggctattcatccagcagaataattcatgatttcaaaacagcttcatctctgtttaccgcagagacgaagctgttttctttatggataacttttacaaatgttttcttctgatcctcctgcttcttttttccagtgctgcagcagcctcttttctcgcaagctgtctgttacggatcgtttcatccagatcccggcactggtcttctccctcttttttcatatgtagctcctgaacgatcagacgttccatgattttctgaaattcaagtattttttccctctcaggctgttcatcttcaagaagcttcactttgctcgcagtagtcccgggtgcagtccttgaaattcttggaaccagttctttgattgctctcaaggcaagtcctcttttctttagttcctttatattagccagaagcgtaatatcatttcctgtatagtaacgatgtccctgctcattcctgcatatcctcagttccagttcttcctcccagtaccggaggaccgatgccctcacgccaaggatttctgcggtctgagtcacagtataccgctgctccatgctgcccctcctccttttgagtccattttttcatcagaaatcactgatgcatatcaacaactcaatctatcacctgatatcattgaaccactgcactgtaaaaacagctgtcgtaatcctgatatcatgtatatttattataaaacgccataccgagattgcaagaagtttcgattgacaaacttccctataaaactttattttgacacaaaaaacagggaaacagtaccggattctccccctgatactgtttccctgtgaaatttttctatagcaatcctcgtaaataatgcatttaagacaattcagcaggatttcacactctgatggactggattaagatgcattattttagaggattgctataatattattcaagtcaaagatcaaactcctctgagatagattatttcttcatattcacaaactgtgtatatctcggcagccataccagttctactgttccgatgggaccgtttctctgtttggcaatgatgatctctgcaatgtccttcttctctgtatccttatgataatagtcatctctgtagataaacattaccacatcggcatcctgttcaatggctccggattctcgaagatccgaaagcattggtctgtgatccggacgctgttccaccgcacggctgagctgagacaatgcgatcaccggcacattcagctctctggcaagagctttcagagaacgggaaatatctgaaatttcctgctgtctggaatcactttttccacttccgctcatcagctgcagatagtcgatcatgataatcccgagattatgttccagcttatatttcctgcatttggagcgcatttccgcaatggaaatacccggcgtgtcatcaatgatcagattagatttaccgataatatctgctccttctaccagttttgtccagtcctcgtctttcagattacctgttctcatattctgggaatctacatgagattccattgccagaagtcggttcaccagctgttcctttgacatttccagactgaatatggcaactgtgacatcctttcggaatgccatatactgtgcaatgttcagtacaaaggctgttttccccatggaaggacgggctgcgatcagcaccagatcagaaggatgcataccggatgttttataatccagatccataaagcctgtgggaatacctgttacagaacctttaagcttagacgctttctcaatgttattaatggcattcagaactacctgctggattggaacatattcttcattgttgcgtctctggagaatattgaacagttttttttccgcttcttccagaataatctctgtattctccttctccagatagcaggtgttggcaatctcttcatttgccttgataagtctgcgaagaactgctttctcactgacgatctttgcgtagtacttcacatttgcagaagtaggaaccgctgagatcagatctcttacatattccatactgctgatatccggcgggagttctttctcctttaaacgattctgaagggtcaccagatctaccggtttcccttcattacacaattccaccattgcatcaaagatgatgccatattgtttctgataaaaatcatcgctggtaagtatctcagatgccacaaggatcgcatctctgtccagaatcattgagccgattacagactgctctgcctctatactgtgggggagtattcttttaatcagcgcttcttccattctttatccctccggaagacttatgcttcttttacccatactttaagagttcctgttaccttaggatgtaatctgacaggcacctgggtaacaccaagtgcacggattggctcaggaagctgcagtttctttttatcaatgtcaagattcaactgtttctttgctgcttcagagatttctttggaagaaacggaaccaaaggttcttccgccttctcctgttttcagtgtaaggatgatttcttttgtctcgagatcctttgcaaatgcctgtgctgcttcatatacttcttttgcgaccttctcttcgtttgctttctgaagtttcagatcatttaaattcttaggagttgcctccagccccagtttcttaggaaggatcatgtttcttgcatatccgtcacttacatttacgatctgtcccttttttccaagtgcttttacgtcttcaagtaagattactttcattttgtgttttcctcctgatattcctgatctatgatgtctttaagcattctctccacctcatccggagaagccttgacctgggcaccggcaatattcatatgaccgcctccgcccatcttttccatcattacctgtacattgacttcgtcaatagccctggcactgatataaacttcattattgtactgagtcagtacaaaggatgccttaacccctgcaatattcagaagctcattggctgcctgtgctcctataactgtaggactgtccagattttcacttggacatctggcaatggcatagcattctctgtaaatctgtgcagttctcactgcttctgcacgtgcctgataagatttcagatcatcccttaacagtttacgtactctggtcacgtctgctccactccttcttaagaatgcagcagcctcaaaggtacgtacacctgctcttgtcgtaaaattgtttgtatcgatcataattcccgcatagagacagtcagcctccatattgcggatacgcaggtcattcgagaaatactgcaggatctctgctaccatctcacaggctgaggatgcataaggctccacataggaaagcaccgcattctctatcacttcgcttccccgcctgtgatgatccagcacaacaattgtctttgtcatgtgcagaagctcctcgcattccgtatagcttggtctgttagtatcaactacaaccaccactgtattgttatctaccatatctttagcctgctcgctgtccacaaacatagatggctcgtagtctggattattcacatatcctgcgatcaacggtctgatagattttgtcggatcattcactacaatactgacagattttccaagtgttttacctgcacggaaaataccgattgctgctcccaacgcatccacatctgtgattttatgtcccatgacaacgactctgtctttcgtactcataaactctttcagtgcctgcgcttttaccctggcttttacgcgggtattcttctccatctgctgagtctttccgccgtaataggtaatattatttccattcttaataacaacctgatcaccgccacgtccaagtgccatctctatagcaatacgtgaatactcataattttgaatataagtggaagcattcagtcccacaccaatactcaaagtgatcgccatctcatttccgatattaactgttttaacctcgtccagaatatgaaatctctgttctttcagagcctcaagcgaactctggcgcatgatcaggaaatatttgtccttctcaagtttctttacaagaccatcgaaattggaaaaatatttcgtaatcttccggtcaatcagagcaatcagaagtgaacgtctcacatcctctacactctcaagtgcttcctcatagttatccagataagccaacgctacaacaagcttattgtcttcattctttttaatgtaagacttcagttctgtatcgtcatacagatacatggcgatcaggctgacattcctgtttgaattctccaggaactcacttttggcaaccacttcaccaagagacaccctctgcatggaaatacgataagtcttctctccaaatcgagtactgatctcagcagtctctttcttatctgcaaccggtaatttgtcagctgttacatccggaaaaacagtgctgacatttttcttataaaactgatctttacctgtaagctccgcaaatactttgttggaccagatcattctgccattcatatccataatggcatagggcaatgccagttcttcaaggattctcttttcaagcgaatcatactgattggcaaaggctatcagttcatttacaatgaacggtctgtggcatcggagtattattactgcacatcccacataaatcaggattccacctgacacaataataccagccttcacgctgacaaaatatacccagatattaagtacgatcagtaaagccgagagaatcagaggccaccgcatgaatgctttcatatgcccttttaatttcagtttatcactcatatctttctttccgttcttcatcattctatttgtttcgcctgtacacagcaaatgtgctgcatataggcaggttctgtgaaaaacgccctttgaatcatattataacagatttgaacagaatttaccatagcaacagaagaacgcacaaaaataatggttattgtgttactgttcattctgttctatagcaattctcgtaaataatgcaaaaatgctgctccgccaaatgcggagcagcatttatcatcttcagaattagtcctggatgtatggcatcatagacatatgacgtgctctcttgatagcaactgtcagtgctctctgatgttttgcacagttccctgtgattcttcttggaaggatttttcctctttcagaaacatattttcttaattttgctacatccttgtagtcgatctcgttattctctttaccacagaatacacaaactttttttcttctgcggccgcctcttctcttcattggagagtctggtctttcgcctctattgtaagccatgattgctttcctcctattttattctatcagtttgtattaaataaacggcagttcttcatcaattccatccggaatgttcatgaaaccgtctgcactggctgctcccggagccggcatggatggtgcaggtgcaggggctgatgtctgaggatgggaagctgcgtaattatcgctggctgccttgctctcagcaaactcctgttcctcaactactacctctgtggtataaaccttctggccatcacgattggtgtagctgcctgtctgaatgcgtcctgaaacaatgatcttaagtccctgacggaaatacttctcagcaaactcggctgtacgtccaaaggatacacaactgataaagtctgctgttgcttcaccgtcacggcggaatcttctgtctactgccagtgtatatctggcaattgccaatgcattctctcctgcggaatatctcacctcaggatctcttgttaagcgtcccattaaaattactttgttcatataaatacctcttcgtttctgctttgaatggttgaacggatcaattaatggtgccttctaaaatccaccctgtataagattatgcgtcttttcttacgactaagtatcttaatacattgtccatgatgcgaacgtgtctttcaacttccgccgggcactgtgcgtctgcttcaaactgaatgaaatagtagaagccttcatgcattttctgaatttcgtaagctaattttttcttaccccattcttctacttctgtgatagtgccgttgtaacgtgtgatgtatccttttgctttctcaacaactgcatcacgtacttcgtcttcaacttttgcactaacaactaatgctaactcgtacttgttcatgtcttgctttacctccttatggtctgttggccctttgcctgtcaaagagcaaggatataaaatatatcacgagtgttgattctaacatagtttttcgtgtctgtaaagtactatttttctttttttatcaaatttttagtatttttctcaaccatcttgcgcggtaccatgatctgatgtccgcatcctgtacatttcaggcggaaatcagcacctacccttaagatttcccagtctctgcttccgcagggatggactttctttaatgtaacaatatcaccaacttcatagggaagtcccataatctcttactcctcttatataactttaacagtaacctgaacagttacccttaaccggctttaacagtgaatctgtgcaaacacctgtccgatcggttcctggatcagaaggtctgcatatctgtctctcggagtcggagatttgttgatcactacaaggtgctctccccggaagtaatcgatcagtcctgctgccgggtaaacagccagggaagttccccctatgatcagcacctgtgcctctgagattgccttcactgcttcattgatcgtctgattgtccagaccttcttcatacaataccacatccggcttgataattccaccacattcgcatctcggaacacctgtggatactttcatgtgggcaaaatcataaaatctgtgacacttcatgcagtaattgcggtatacacttccatgaagctccagcactttcttactacccgccatctgatgcagattgtcgatattctgggtaataactgctttcagttttcctgcctgttccagttctgccagcttcagatgtgctgcatttggttttgcagtgtcacaaagcatcttgtctctgtagaatttgaaaaattcttccggctttctcataaagaatgtatggcttaagatcgtttccggaggatagtcatatttttgatgataaagtccgtcctgacttctgaaatccgggattccgctctctgtggaaacacctgctccgccgaagaagacaatattgtcatatttgtctacaagttcctgtaatctctcaacttctcctgccatttagaattcctcctttattttttccaaacactgttactgaaattttatcatctgaatttttatcgtctgcttttacagcaatacgattttcttctgattcaggtaactgctcttcataattctactgcccgacatcaagtgtatccacacgttttccctggacaacataacgggttgcctcgtttcctgtacaggtagacagagtaatgatcttgtcctttatgttcattccttctgcatctgtctgaatctcggaatatcctctgatcttctccagatatttttcaaattcctcaccaggtcccttaaacagtgtataggtatcactgttcacacctgtggtgtacgcagaaataatctcatacctgtagtttttctcaggtgtaaagatccagaaatatttgctcttcttataagtctcttcatcctgtgtaaacttcttaagctgagcaaacatggaaccatttttcatattatggccatacacgatcgtattacagtcactgaaatcccctttgttttcataatccacaaagatagtacctgcaaaattgtaattcttctcataggttctgtgaagataagtttcattgtctctgccatgcacaatgggataattgatatccggcactgcttccacataaatccatcccactacatcatcatttacacttttaagagatgcaaagtcaatatccataggcgctttcagttcactgcctgcctccggccctgctgcttctccatccggatctcgttctgttaccgccatctgtgtgatcgaattgtactcatccgtacctttcttatattctgtataaatatgaaacagattatatcctgcataacagaatacacagattgctgcgatcagaacaaccgtcaacacaacatcccctgctgtcttcttttttttaggctgtttttctgacattcttcctccatttccgcagcacattgctgctatgtatcagctgctgtctgattgacttctatataatatacagacatccgtttccaaccgctgtctgtgacagactattatacccggtcacatcattcttcctgtaatccatcatgcactgcctccagacacgcttttcgcagttcattttcttctttattatataaaagcatctcgctgtgttcaaaatatgccggacagccatttccggcaataaacgaagtcattgacttatccgctgtgatccctgtcacgaaaagcagcatttcctgattttcgccaaagctctctttaataaatgaaaaggcattctgcagttctccctggagtttctggatcatatcttctctgcatactgcttctttttcaaaacatttactgatccgcttaaatccattttcagctgaccgcacatgttctttctttgctgtcagaatatattccctcagcctgcggattgccgtctcctgatatttctgttctcttactgagatcagttccatctttcctttgatctgcagactgttttcctgttcctgcacaaattcttcaagcaatgaaattcccagcttctcttcctcagcattctttctcacctgagttctcagatgcagaagcatctcatagagtacctcaagctgatgatctgcctgtccatattcttccgctttttctctcaatgcccccaggatcagatttacaactgcaaaacgctcctcaaaagctccatctgcagccatcttctccttcagcgccagattctcccggctcagatttccggacaggatcgacgggatttcataatcctccccatactttgtatataactgataaaaacctgcaaaatctctggctgtttcctctttctggagaaattcctccaccagttcctcactgatcccgatccccagcttttcatagctttgcagaagtcttgaaagatcctcccatcccctggcagtcacaaagaatttaccgtctactgtattctccaccgcatagaaattgtttttcttcacagacagataagaaatgattgcctggtgcaccttctgctgtcctgcatatttcagccagatatcgcagtcaggctcaattgtaagcttacggacacggtcgagtgtgacaatatcaaattccctgacagatttattatactccggtggatttcccgctgctaccagaatccagccttccggaatcttatgacttccaaaggttttattctggagaagtgccagcattgccggtgccagggtttcagacacacagttgatctcatcaataaacaggattccctctttcctgcctgtattctccatacaatcatagacagatgccacgatctcactcattgtgtaatctgtcaccatcattccttttccaccgtaattccgtttaacgatctccggaagaccgatggcactctgacgggtgtgatgggtaatggtgtaggctacaagtcccacaccgcactctgctgccgcctgttccataatggcagttttgccgattcccggcggaccgatcagcaacagcggtctctgacggatcagaggataagtataatatccattctcatccttcgccagatatgcacgaagtgtattacagatttctgtttttgcttcctgtatgttcattttattatcatactcctgctaattatttagttactgttcactccgttcccagcaacacgcttcgcgatgcacagaatttatgctaatcgcataaattcgcgcggtatgtctcggattttctgtgaccttcgctcacaaaaaacacctcgcgggatattaccagtgaacagtaacattatttactcaaactgacatctgctccgcagtttgtcccgttcctgtgatcagacatttcgcccatggcggcaccagtttcatcttgtccgtccgtttcagaaatacaaatgcagtctcataatccggcttttgtcccggataaatcccgtcaccatctgtaaaatagatcagtgctctgagattcttcagttcttttctctctttttcctgacggatcaattcaaatacagggcggaaatctgtacctcccctgccctggatcttaacgttccggatgtattccttccactcttcctcagaatggatcacatccactttctggataaaacagtcgcactggacgatatataccttcatcctgctgaaaaaattctctttttcacttaaaatcccataggtttcacccagaaatctctgtacagtttctcctgaacatgaaccggatgtgtcaatggcgatcaccagctcctccagacggtttacttctttatactccaacggttctatcaatggaatatttccataatgttccattccaaagctgtaaaaaatataatcaaagctctccgtatccagctccacttcctcccgcagtctgcagaactgcttcagaaatttccggtaatcatatttactgcggtagatctcatccagttcttcctgctgatcgtttgtctgagtccctgccctgctttgcataccggtcttattctgtgaggtataagcaaggatatgttcccatttttcctttgttctcctgcctcctgatgcctgtccggcagttctctgccagaatatgtgatcatcaaaagtatttgtgttcacctgtgtatcatctgattttcttttcttcaggctgattttgccttctccgacagccttgtcgatcagctgctctacaaaacagtcgcattccctgtcccattcaccggaatctctgtcaggttccatgaaaatatgaaggtacagacagtgaagcagcatgtgcagatatcctcttcttactgctgccggatcttccagatattttttcataagaaataccggattaaaataaatcagctccccgtctgtcccaattgtatcaatgctgctgtctgctttgtattccagacttgtaaatgccccgtccagataaggaaagtccagatataattgatttctgcagttttgcaggattttttttccggtaagttcctgctctgttgttgttttacagtgaaaagtcttttttttggtatccatattttttatctttcagatgaagcagccataccagagaacgcaactttgctttttcctgtgcacatcttataaaattctccagttcatttgcggaaaaccatccgcatttctcgatctgctccatcctttctgtatcctcattctctatcagaagctccattacagaacgtattctgagcttcaggtatttctgtatctcctgatatttatcggactctctgttcggattttcctgaaaataaatctccagagcctgttcaagctttctgtcctgcatcagatcatcttcctctcctgtgaaattaccataaccacaatataacacaaaaaagcttcattttaaagtcctgttcctgcccctctattgactttcctttctgttatgttactataaaatcacatatattctatcacagatgaaaggattttatcttatgaatactatcaaaaaattcatccactactatggtccgtataaaacggtcttttttattgatctgatatgtgctgccgtgatcagtctgatagatctggcatatcctcagatcctgcggactatgacaaaaacactgttcactcaggatcagtcaaggattcttcatgcactgcctgtgatcgcaggaggactctttcttatgtatgtgctccaatgtctctgcaaatattatgtaacctgccagggacacatgatgggagcaaatatggaacgggatatgcggcaggaattatttgatcattaccagcagctttcattttcctattacagtcagaataattccggtcagatgatgagcaagctggtcagtgatctttttgatatttccgagtttgcacaccatggtccagaaaacctttttatctctctggtaaagatcatcggtgcttttgtctttcttttctttatcaataagaaactggcatttccactgatcatccttgttattgttatgttttggttttcctttaagcagaatgcccgaatgcagacaacttttatggaaaacagacgtaagatcggggatgtcaatgcaagtctccaggacacactttccggtatccgtgtggtacagtcctttgcaaatgaagatattgaacataacaaattcaaaaaaagcaatgaagcttttctgctttcaaagcgtgataattatcgctgtatgggaagctttatgagctctaatctgttctttcagggaatgatgtatctggtcactctggtgtatggcggttatcttattgccaacggagaaatgcagactgcagatcttgccatgtatgcactttatatcggaatctttatcagtccgatccagattctggtcgagttggtagaaatgatgcaaaagggtctttcaggcttccgccgtttccttgatgttatggaaacagagtcagagatcacagacgctccggatgccagagaacttactgatgtgaagggacatgtaagctatgagcatgtatcttttcattacagtgacgataatacccctgttctcagtgatatctctattgatatccctgccggaaagtctgtggcacttgtgggtccgtcaggtggcgggaaaactactatctgttctcttctgccacgcttttatgatgtaacagagggacggatcactgttgatggaaaagatatccgcagcctgaccctgaagagtctcagaaataatatcggaactgtacagcaggatgtctatctgtttgacggtacgatccgggataatattgcatatggaaaaccgggagcttctgatgaagagattattgcagctgcaaagcgggcaagcattcatgattttattatggaacttccacagcagtatgatacctatgtcggagaacgcggaacaagactttcgggcggtcagaaacagaggatttccattgcacgtgtgttcctgaagaatccaccgatcctgatccttgatgaagctacgagcgctctggataatgagagtgaacgatggatccagagaagtcttgaagagctttcacagaaccgtactactattactatcgcgcacagactttctacgatcagggatgcggatgagattattgtgatcactgaggatgggattgctgagagggggacacatgaagagctgttggatatgaatggagtgtatgcggcttattataatatgtgattttgtttatagtatccgataataaactgcgaaacagttatctttatatttgcaatctactgatatatattataacagcgcaggaaaattaattgtctggcgtgcatttgcaggatacttagatattcttagacgataaaaatatgcgttatgagcccacagggtcactgtctgagcgacagcgagtttgaccctgcgggctcatgcttttagcagatttttatcgccttagaatatcttagtgtccgaaaccgcacgccagacaattaattttcctgcgcgtccgtcaatctatactattttcggtatacgaatgacgggaggccgtcttcgccgcaggggatctgtactgttccttggatcagagggcgggcgtagtttatgaaggcttcagtgacgtcagatccgtcttctgtgatccactctgatggaactgttttttcttcgttgcagatggcattgacgtcttcaagaccacattccatgatataggttccgtcagaggtttctttgcggataaatgagatcatttttcctgtttcgccgttgagggctgcctgtacgccgaattctccggctttgatggcttcctgctggtctgtggcggacatcatagatgcagagcaacgctggctgacgttgagttctacagaacgggcttttacaccgaggcggtttctgacaaggttttcgagatatttaccacagcctgccagcattttgtgtccaaaggtatcagtgcctacggaattgtcgtattcacagataaatgtgcccttgtcgtcatggattccttctgatacgcagacaatgacattgcagtttttctcaaaggagttctctactgctttaagaaattcttcctggtcaaaggctgtttccggaaggtagatgagaagagggttgtctcctgtatatttgcgggcaagtgcagatgcagcagtgagccatcctgcgtggcggcccataatttctataatcgttacggatttcttttcataaacatttgcatctatggtaatctcgcggactgtagaagctacatatctggctgcacttccaaatcccggagtatggtctgtgtggatcagatcattgtcgattgtttttggttctccgaggatacggatatcactgcctgtctgcgcagcataacgggaaagtttgctcaccgtatccatggaatcatttccaccgatatagaaaaaccagccaatattcatttcttcaaattttttaaaaagtcttggataaaccggatcttccagtgattccggcaatttatagcggcaggaaccaagataagcacctggtgtgactttcagaccgtcaagtttctctcccggaagtgcttcggcaaagtcaagaactgttccatttaaaaatccttcaattccgtttatcattccgtaaacatgctcaatagcttccggatgacgcattccctcggatacaactccgtaaaggctgctgttaattactgcggtaggaccgccggactgaccgacgatcagattctttctggacataagaaacctcctgtatcgtttgatttaatgtgattgcttttcattatatcatacaactgccttccatagcaattcaataaaaaggtgtgttcccacatccccctgtgaaagcacaccttatatttcccatattcagtttctgtttttattccccgaattccctgtggtcttcttccagtttctgttctattttaatctttttttttgcctcttctttctgctcatcccgtgttttcggaaggatcacattaagcattactgcaataatagttgcaaggacaaccggtgatttaccgaaaattgttgttacccatgtgggaaagcttgcaagtgcagctgttgcctgagatacacccattcccagtgcagctgcaagtcctacgatagatgaattacggtaatccatctcagcagaagcaaccagcttcatacctgtcattgcgatcgatgcaaatacagacacagttgcaccacccagtacacactgaggaatcgttgtcaggatagctgagaatttcggaaccagacctgctataccgagaattgcagctgcaagtcccagtacccaacggttgataacctttgtagttgtaacaataccaacgttctggctgtatgttgctgtgggaagtccgccgagcaatgcgcctacaacgttagaaagaccataaccaacgattccacgctgcagttcatcatccttaggtgttctgtccatagctccgatcgtagtcgctgaataatcaccgattgcctgaatagagttgatagcaaataaaattcccagtgcaacacaggaagacggctcaaactgtactccaaaatgcatcagagatggaagctgacagacacctgcttcccctatgcttgagaaatctaccattccaaacggaatagaaaccagatatcccactataataccgatcagaatagatgccagtttccagattccctttccaaaatgattcagagctgtaacaacgatcagcgtgaaaaatgcaattgcccagttctgccaggatccgtaattcggactgctggtaccgcctgccatataattaatggcagtcggatacagggaaagaccgatggtaaatacgactgttcctgtgattagcggcgggaaaaatacccgaatcttcttgaccagcaaacccataacaactgctacgataccaccaacaatctccgcacccatgattgctgctattccatacgattccgctatcgcctgcatacttggcacgtaagcaaagctgacacccatgataataggcaggcctgagccaattgcaaatttcgcctttccgccaatcggaaacagctgaagcaaagttgacaatgctgcaatgaccagtgccgactggatcaggataacctggtcttctctggagagtccgcctggaactgctccggaaacgatgatcgccggtgtgacacagccaacgatcatagctacgacatgctgcatggcaaggggtaaagcctcactcatgtgggggattccgtcagtttcaaaaatactgcctctcttcataattgcctcccaatttcttttgtacgattgtaacattttttgttcaaaaaaacaattagacagcctaattatttttggtctaaaactatacaatatttactcttaaaatttggttattattttatcttttatatgtattttccagtatttcataaacctttcagtttataatctcaaatgtccgatacagatccagtcttccatatccccatcccggattggggtattccatctgttcttctctcactgcccctttctgcagataaaacttcaccgtatttccagatgcataaggaatatttcctctcacgatcgcccattcctgcaccaatgctgctgctcctgcaacaacagccgaagaaagactgctccccgaagcctttccaaacgcccctcccggcaatggaatgagcagatctactcccggtgctgccagatcaggtgtcacctggttatttggagtaaaccctcgcccagcctgaaaatacagactgttatccagatactgataagctgttgccgtaatacctctggttgaatccccaggtgcagtaacagttatataaggtgtagactccagaaaataagtatccggcgaaatcagcccttgcaccggaagccacatgtgaaacctgcttcccgatattccttttttactgacatttaccttccagatacctgctgccggatgaaagaagcgaaaataaatcagctgtttcccggtcatccgctccatctttacgtaattgaccagcactttcgtctccacaaaaatgaaacttaattcctgagtacctgcaccaagagaactgctcacatacagcttttctcctgccggtgactgtaacgatatcccatagtcatccggcggatctccccaaaattccatggaaaatccttcttctttatccgcaatacgaagttcaacagtatcctgatttttcacatagtccaactctgctgtataatgatgctgtgctgcaccctcatttcctgctgccacagatactgatacctgagaatcttcattaatataatctacatatcgactcagctcactgtcaccaacatgtgcgctctgattggtgccaagtcccagacaaacggaaaccggcattcccatctcttgtgccatcttcactgcaaaagaaatccccagcataatgtcgtcttcctgaaataccggtgcctgtggcggatactggtaaaattttctcagatatgattttgctttctttaatttcaccacaatgatcgttgctttcggagctgctcctgagaaattttctgtgggtacaaaattgcctgctgccagccctgccatagctgtaccatgtccgttctcatccaatgagggtacaatctcctgtggattctccgacagcaatgcctgattaatttcctctccggtaaaaacctttccataaggaacctgttcatcctcatttcccggaattgtctgatcccagatatatgcaatacggcttacatctccgtttcgaaagattggattcagataatcaatcccggaatcaatcactgcgatcactgtgccctctccctgaagtttcagatagggatgattatgtaaccgcgtaatcccggatgaatttaatgcatccgcatccataaatgtataacacttcggcaaagatgcatacgtataggaattaatttccagcggaccaatctcattcagcggaatatatagaattccaaacaattcattcacaggaagaaattttccacccatattctgtccatgttttacaataaaatccccgtactcttcatcctgtgccggcggtattgacggctcagcatgaatgcccggggggttttcctgctgtatctgcacttcaaaatcgtcaggtccgaacattactgtcctccctggagcgtgtttgaaaaatcattcccacaaattgtgacgtacatcttgcgtaaagcatttttcaaacacactctagattttttatacatgatatgcacaatatatgctctttatgacaattctaacctttactgttcagactgatattcgcttcctgcttttgtttcttcacaacagtcagtaataatataattccagccacagttgtaaaaatactaataaactgcgaagtcgacaatactcctacgcttcctctttcaatatctcctctgaaaaattcgatcacaaatcttcctatactgtagaaaataagatagcaggcagccacctgtccatctgccttcttatgctttgccacataaagcagcagcagaaaatgggcaaaatccaaaaaaacggaataaatctgtgtcgggatcagagcaacattgttgggtgcaaaatctgaatttgtaaacgtaaccgccagaggccctgaagtttctttcccataacagcagcctgccagaaagcatccaatcctgccaaatccctgtgccagtgcaatggatggcatcatcagatcaaaatactccagaaatttcaacttctttatcctgcagtacagccagcccaccagaattcctccgatgattcctccatataccacaaatccatctgatcctatgatctgccttggattctgcagaaattccctccagttggtgatccagaacaaaatcttcgcagatgtaaatccaccaatggcgcaccacactaccagataaaaaatatgttcacatgcaagtttcagtttacgcgctctctgctcagccacaaaccaggcagccaatactcccatggcaatcataaatccataaccatataccgtcaacggtcctatatgcaacaattcattatgcatgtctcaaatcctctcaaatcttaaaatacttcctgtcactctctcattttatttattattcacagtcggatttcccaaataaaccttcaaaaacctccagcaatttttcatttgcataatcattggcttcattctcatgtaccgcttccgcatctgcttctccgcagatatccacaccggcaatctttccactgctttcttttgcacattccaatacagtctgtacaccggacaccaaagttgtcagcctcatatccccctggctccatgtcgtctgtgcatcctctgtacaaagcacatctttatcaacagatatatataatggaaggaatttttcagcatcttcctgtaaaccttccgattttctccagttacatacttcactgactgtttccctgagaaaccagtttctctcttcatcattcatcacctgaagtttctctctggagagaaatatcactctgtccttcagattctcatctacctgctcataggctgcttcatccggtcccacaaggatcacatatttcagattctccagttcctccaacgctgccgcgatccatcctccacacgacaaaatcccaccaaaagccggaggctgcatatctgtatgattatcgtataccagcagacagaacggttgatccattcttgtcagccaaagtcttgtcatatagtgataattgccggaatcaataaaatggattccggcagttggataattttctgttcgtttattaatctctgcgattgcttcctcatcacaatagcagtttgtcccacagacatcctgaagctcaatccaggatacctgtctgtttttccagaattcttcttctctgtaaattccggagaaattcatcagtacaatgggattctgttcctgcatatttcactcagtccttccattcttccagcggttcatcatgatttttcagcatttcccggatttctctgccgggactttccacgccttcatccggagtctgcatctctgcatccagaatggcgtctgcatctgctgcatctgcagtcttcccggtttctatttccatctccgcttcctgaacctgagaatctgtatcttgcttccattctgtttcatcttcatttaaagatttatcctgcactttttcgtccagacctgcatctgccgggtcatcccatggtttctctttgccattctcttcctgttctttttcagcacagagtttttcggattttttcattccaagacgaatcatgatcaaaaatacaatgtctgccactccatcagcagtcagaataattccggaaaacaggatcatccgggttacactcaaaaaagaatagagcaacatggaaacacccagcgcaataaataccagacagccaataagaataatcttccagcgtcctctatgggcttttttcagtctgtaacttccctttatcttccagatactgtcaaccagtaccaaggctcccagtaaatatggcaggattttgatcacgatctgcggtgtaaagaaaagaaaaattccaagcaccatgacgatcacacctgtaaacagatcaagaatcgttgccttttccttctcagctgtataaataacaatatgataaataccggaagcgatcattaccagtccgaatacaatcttgcagataatgtttacggtctggtccggaaccaggagcagacacagaccaaatgccagataaaaaaccgatgataaaatctcacttttaaaaaaatcagaaacttttttccccataaccttttcctcctgactgtatgatagcaagtccccacccactcttattgcttttcgcaatctccgcaggggacttacttgattcggttaaaaatactattccatttcttctaaaatagtataacttctttctttctcttcgtccacaggcaactgcatgactttgtgtaaaatttgtgaatttttccttgaagtttttttagtgcgtattataattatagcgatactcataaataatacatttgagagtattgctataaataaaactatgtcataaaatggatattttccataggaaggatttattttgaaaaaacaaccaaagaataaagttttatttcttatccctgtcggtgttatactcgccggtgcagtgatttttttatgcatccgcggaaatgagaatgattctgtctgtaaagaaaatgtagcccgccttcaggctctggaaaattcagacatttcacagacagaagaacagcttcaggctctgaaacagacaaccggcatttcttccggttctgatgcttcagacggttccggatctaccctgttaagtgatgtagaaatccgacaggtttttgccggaaacgtcatcatcggtgactctatcacagaatccatcgtagaatacggatatctggatacggatgtggtagtcagcaaacgaggattaaatgtaggtgcagccgatgatcagatcagtacggcaattgctctgaatccctctcatgtattcatggcatttggttccaacgacctggaaatatatggttcggcttcatcagaatttattgatgcatacaggacgcagataaagaaaatccagacagccttaccggatgtcccaatttatatcaactgcattctgccgattactgatgaagcgatcgcacagactcctgatcttggatattaccctgattataatgaaggacttatcaaactctgtcaggaaatgggatgtacctttattgacaattcaacgattgtaacagacagttcagaaaatctgtatgaaccggacggtgaacatgtgattcaggactactatcccaaatggctgacaaatatggcacagattgcggggttaaaggcatgaaaaattatttacatatttttatcaaaggtgcatttgttcttttccttatcgcatatctggctgtcctgtatacctccgacagcgcaaagaatgtacccatggaacagattgcacagactatggaacaggattctgatatcacttctttaaataaagaagcacgttctgatctgaaacattattatcagacagatgaccgcaatattgacggttatttcttctacaaagccgcttcacccatggcagtagaagaaatctgtattatgaaggccactgacaatacccaggcaaatactttgcttgaaaatgcaaacgcccatctctccggtcagaagcaggtatttgagggctatggcacagatcagatggctcttctgaacaatgcagttgttggaaaaaaaggaaactatgtatattatatgtgcggcgcagacgcacagaactggcgcactgcctttctttccatgatataagcattttactttaatcctcgtaactgttccgcattttacgctaatggactgcagaaccattactatggcagtcctcttaataatactgttaagagaaaatgcagttaagagaattactataatattcataatatccagattggagaacttttaatatggtattcaacagtatattttttatattctgctttcttccggttttcatgctgatctactacctggtaccgggaaagctccgcaatctgctgctgtttttgggcagtctgatcttttatgcctggggagaacctgtatatgtgatcctcatgctgttttccagtatcttcaactattatatgggtacagaactggaacgtttatattatgatgacaggaaacagaaaattaatctgatcttctcaatcattataaatcttgcagtacttgtgttttttaaatattatggattcttacttaacacaatcggaggaatcatcggtatccatatccctcatccggagctttcgctgccgataggactttctttctacactttccgtaatttgtcctatctttttgatatttatttaagtaaggtcagtgcgcagcgaaatttcctgaccttttccgtatacagcacaatgtttccttatacctctgccggaccaatcgtacgatatacggatatagagacgcagctgaagcagcgtaccattaatatctccaaattcggtatcggtgcagagctttttgtcaaaggtcttgcaaagaaagttcttctggcagataatctctcggttttatacagcagtatctgtggtcatccacagatgtctgtatttacttcatggcttggcattctggcttatacaatgcagctttattttgacttcagcggctattcggatatggccatcggtctgggaaaaatgctgggatttgattttaataagaactttgattatccctatatttccaccagtgtttctgaattctggagacgctggcatatttctcttggaagctggttcagagattatatttatatcccgcttggcggtaatcgggtctccactctgaaacatatccgaaatatccttgtggtatgggcacttaccggtctatggcatggtgcaagctggaatttcgtactatggggtgtttattacggactcttccttttactcgaaaaatttgtacttcagaaatatctgaaaaaaataccatcctggctttgcactgtatacactatgcttgtagtcatgatcggatgggtattcttcagccagacagactttggtgcccttggccattaccttggaactatgtttgggatcggagcttccggtttcatagacaaaactgcactttactacctcaagacaggatttatccttcttctgatcagtattcttatgtgccgtcctgctccttaccagtactttaagcgtctggtcagacgcagacctgttgctgcagtgatcataaatcttattttatttgcattatcgattgcctatatggtttataactcttacacaccatttttatatgcaaaattttagaaggtaaacaatatgaaaaaatcattaagaaattatcgtttatttttccacagaatgggacttttgtttttatttatccccttgatcgtactcattctgagcattgtgcttcctgacagaggattttctgaaaaagaaaaccgcgtactttcttccctgcctcatttaaacggcagtctgattgcttccggcggatttgaaaaacaatttgaaacctatgaaaatgatcagtttccccttcgcgatctgtggattaccctgaaagcaggaactgaccgtctgatgggcaaagtagaatctaatggcgtatacgttggaaaatccggatatcttatggaagaatttaaagcgcctgatcagacacagtatgacgccactgtaaaagcaatgactgactttgcgcaaaaacattctgatctgaaacaatatgcactgatcgccccaaattctgtgaatatcctgagcgacaggcttcctgcttttgcccctgtccaggatcagaattcctggcttgacagcctctctgcctccctgaccgatgcaggtgtgacctttattgatgttcgcagcacttttaaagatcacaaaatggaagacctctattatcacactgatcatcactggactacccagggtgcttattatgcctatcttaaggcagccaaagatatgggaattgatacttcagcagacacttatgacaaagcacctgtcacccgttcttttcagggaacactgtctgccaaaagcggtttccgctccggcgaaaaagatgagatcgatgtatttctccccaccggagatcaggcactctcttctgtagttaattatgtagacgaacagaaaaaaagtgccagcttctatgatactgagaaacttgagacaagagataaatatgcattattctttggtggaaaccacgctcagataaagatcagtactcctactgaaacagataatacactgcttgtgcttaaggattcatacgcaaacagcttcatcccatttcttgctcagcattaccgaaagatcataatgattgatccccgttattactttggagatctggagcagttaatgcaggttgaaaatgttcaggaaattctgtacctgtataatgctaataccttcttcacagacacttctctggagcttgccctgacaactgctgaacaggattcttctgatacatctgatatcagataatattatatcaaaaaatccccaccgaaatttcaatgccgaggaaacattgactttcggtggggatttttcacacattcacacacattttataacacacacttttcacacactttttaataatagagcaggtataacggctgatttaaaacaataatactgtgtcttgcattccccgttcccagtttatctgttttttatatcagctgtaccttaatgtgtattatatcagcatttacgccctcttttcattttatgcaaattcagcaatttattctgcaaaagtgtcctttgagtctccaaaatgatttacaaaataatcataatacgtatccagtatttctttccgcccacgaacacgtataggcacaagtgttccatcttccataataaaatcgtcctctacatccttaatataatccatattcaccagataactctgatggcagcgcagaaaacgtttctcattaattctcttctcaatttctcccagcttgtccactgttataatttcggaaccatctgacagatgcagggtgacattatgtttatcgctgtcaatatacatgatatcatctgtacatggataacggtactgtcttctgtttttgattgcaacacgccttttcatatccgttttaagaatcctgttcagaagtttcatcagtttctcttctgaaaatgatttcaacaaatatccggaagcctgtacttcataactctctatggcataatccggtgaggcggtaagaaaaatgatcggcaccttacactgtatctgtctcaattttcttgcagtttccattccattaagtttcttcatacaaatatccagaaaaagcagatccatagcaatgtatccttcttccacatcggctataagcgtctctcctgaatcatattctacaattgaaacctcttcatttatttcttcaaaatactgacacaatatttcttttaaaagaagtctttcaatctcaacatcatcacaaacgacgatcgttttcatgtaatttcccctttccgtatcaatataaaaagcagtttccaaaatcctgtcagtcgcaaagttctggcatttatctgtaaacagcacaatttctattaattatatatgcttaatcctacgtattcaagtactttttttatttattttacttttttataacaatcattgttgtttactttttttgtgttatacttatatggtagcttcacttatgacagcactttggtaaaacaatcatatactgaactgttactctatttaaccgaatcaggtaagtcccctgcggagcagttattcggtgtaaagctgcgtagcaaagcggatgattttatccgcttgacacagaaagaaggaattatatgcgtcaggaaaaatttaaaatggaacgtcaaggattaataaatgtgggagatgaaatagaaatttccgaatatcaatcttttatgaattacagttatatcattgaaccggctgtggcaatgtccggctgttatccaaatgcagaacgcatcagatccagaaaaggaatcgtaaaaaatattgaacatacaccgcgaggttttatagtgactgcagaatttgatgaatagttacatatatttttcaaacacacttcagaaaggaaattatcatggacaataaaataataatccgtactgcttctgctgcagatgcaccggcactgcttaaaatttacagaccatatgtagaaaatacagccatcacctttgaatatgatgttccctccacagaagaatttgcttcccggattcaacacactctgagaaaatacccttaccttgtagctgaggaaaaaggaactttgcttggatatgcatatgcaggtcctttccatgaaagacctgcatatgactgggctgtggaaacatctatttatgttgatcagtctcttaaacacagagggataggccgcatgcttcatgatgcccttgaaaccgctttacgtgagcagggtatcttaaatatgaatgcctgcattgcctatcctccaaaggaagatgaacatcttgacaaaaacagtgtggaatttcacactcatatgggatatcgtcttgtaggtgagttccataaatgcggttacaaattcaaccactggtataatatggtctggatggagaagctgatcggtgaacatctgacagttcaggagccaccgaaattccctctcctgtagcctgttatttctgtgacttccagaaattatcagaatcaatcctgtgtcactatcgcaagtgtcagtatacattaacacaaaaaaaccttagaagatatttctaaggttctttaagaggtgccacccggatttgaaccggggatagaggtgttgcagacctttgccttaccacttggctatggcaccatattcactttttattatatgtaagaaatcttacataatgactccaaggggatttgaacccctgttaccgccgtgaaagggcggtgtcttaaccgcttgaccatggagcctggtagaaaattgaatttgatatcggacttcatgtttccgaaaactccccctgttggactcgaaccaacgacactgcggttaacagccgcatgctctaccgactgagctaaggaggaataaaggtttgcaccttcaaaactacatacatgttgacatttccttgagattcattcttcctgcgattcttggtcaagccctcacccgattagtaacagtcagctccatgtgttgccacacttccacctctgccctatctacctcgtcgtcttcaagggggtttacttctttacgaatgggatatctcatcttaaggggggcttcacgcttagatgccttcagcgtttatcccttccgggcttggctactcggccgtagacttggcagtctaaccgatgcaccagcggcccgtccatcccggtcctctcgtactaaggacagctcctctcagatatcctacgcccacgccggatagggaccgaactgtctcacgacgttctgaacccagctcgcgtaccgctttaatgggcgaacagcccaacccttgggacctactacagccccaggatgcgatgagccgacatcgaggtgccaaaccactccgtcgatgtgaactcttgggagtgataagcctgttatccccagggtagcttttatccgttgagcgatggcattcccacttaataccaccggatcactaagccctactttcgtacctgctccacccgtcggtgtcgcagtcaagctcccttctgcctttgcactcttcgaatggtttccgtccattctgagggaacctttgggcgcctccgataccctttcggaggcgaccgccccagtcaaactccccgtctggcattgtcccaccgccgggtcacggcggctggttagaaacccaatactgcaagggtggtatcccaacagcggctccatggcaactggcgttaccatctcctagcctcccacctatcctgtacatgcaataccgagtcccagtaccagactggagtaaagctccatggggtctttccgtcctggcgcaggtaaccagcatcttcactggtacttcaatttcaccggatgcattgtcgagacagcgctcaaatcattacgcctttcgtgcgggtcggaacttacccgacaaggaatttcgctaccttaggaccgttatagttacggccgccgtttactggggcttaaattcaaagcttcgcgttaccgctaacctctcctcttaaccttccagcaccgggcaggcgtcagcccatatacctcacctttcggtttcgcatagacctgtgtttttgctaaacagttgcttgagcctattctctgcggcctggtttcccaggcaccccttatccctaagttacggggccattttgccgagttccttgacaatgcttcttccgccggccttaggattctctcctcatccacctgtgtcggtttacggtacgggtacggtataaacgatagcggcttttcttgacgcatggctcacggacttcgctactttatttcgctccgcatcacggcttcccattgccacccggatttgccaaagtggctggtaccccgcttgcaccgggctttccattcccggcttccgctttccttacgtgtccccacagttctgtcataccgcagtacaggaatctccacctgttgtccatcggctacgactctcgtcctcgccttaggccccgacttacccagagcagatcagctttactctggaaaccttggatattcggccataaggattctcaccttattctcgctactcattccggcattctctcttccatgcagtccacagctccttccggtactgcttcttcccgcatgcaatgctcctctaccaacctttcggttccttagtttcggtggcgcgtttcagccccggacattttcggcgcaggacctctcgaccagtgagctattacgcactctttgaatggatggctgcttctgagccaacatcctggttgtcttcgaaatcccacatccttttccacttaacgcgcacttggggaccttaactgaaggtctgggctctttcccttttgaccgcccaacttatctcgtgcagtctgactcccgataatcgattacgcggcattcggagtttgatattcttcggtaggctttgacgccccctaggaaattcagtgctctacctccgcaaatctgtatcgaggctagccctaaagctatttcgaggagaaccagctatctccgggttcgattggaatttctcccctatccacacctcatccccacccttttcaacggatgtgggttcggtcctccactacctcttacggcagcttcaacctggacatggatagatcacccggtttcgggtctactcctactgacttaaggccctattaagacttggtttccctacggctccacacctgaagtgcttaaccttgccagtaagcgtaactcgccggaccgttctacaaaaagtacgcggtcgcacatataaagtgctcccacagcttgtagacacagggtttcaggttctctttcactcccctcccggggtccttttcacctttccttcacagtactatgcgctatcggtcactaagtagtatttagccttagggggtggtccccctgatttcccacaaggttccacgtgtctcgtggtactctggatcctgctcagtctcatcagctttcacgtacggggctttcaccctctccggccggctttcccaaaaccgttctgttagcttcaaagaatcttaaatgcagtccgtaaccccggaatgcacgcattccggtttaggctcctccgcgttcgctcgccgctacttacggaatcgagttttctttcttttcctccgggtacttagatgtttcagttccccgggttcccttcctacagttatgtattggctgtaggatacatgaggtttgctcatgtgggtttccccattcagacatctccggatcacgggatatttgctcctccccgaagcttatcgcagcttatcacgtctttcatcggctcttagtgccaaggcatccgccctgtgcccttattgcttgacctttcgcttcatcaccctagcgtaggtgatgcggtcgtttgattctcattgtttttgataactttgttatcgatgtcttcctatcttgcgttttatgagatactctcatatctcttaacgttttgtatcaaggatatttgattaacttttaatcaaatttcatgtatgcagttttcaaggtacatattgactgaatttttatcagtcatcagaaatcttaaacatgtttaaaatctctaatcactggtaaagaccagatatcttatcaggctttcgcctgttattttctttttgatctggcgcccacctgctctcccacaccgtctccagtgcagtaccatcggccgattgggtcttaaccgtcgtgttcgggatgggaacgggtgtgtcccccaaccgcatcggcaccagaaatgtttcagcttgatagctaaacagtaaaacacattgcaattttctacttcttcttccttagaaaggaggtgatccagccgcaccttccgatacggctaccttgttacgacttcaccccagtcatcggtcccgccttcggcagctccttctttgcagttaggtcactgacttcgggcgttactgactcccatggtgtgacgggcggtgtgtacaagacccgggaacgtattcaccgcggcattctgatccgcgattactagcgattccagcttcgtgtagtcgggttgcagactacagtccgaactgggacgttatttttgggatttgctccatctcacgatctcgcttccctttgtttacgccattgtagcacgtgtgtagcccaaatcataaggggcatgatgatttgacgtcatccccgccttcctccaggttatccctggcagtctccccagagtgcccaccttaaatgctggctactgaggataggggttgcgctcgttgcgggacttaacccaacatctcacgacacgagctgacgacaaccatgcaccacctgtcacctctgctccgaagagaaggtccgattaaagaccggtcagagggatgtcaagatttggtaaggttcttcgcgttgcttcgaattaaaccacatgctccaccgcttgtgcgggtccccgtcaattcctttgagtttcattcttgcgaacgtactccccaggtggaatacttactgcgtttgcgacggcaccgaatggctttgccacccgacacctagtattcatcgtttacggcgtggactaccagggtatctaatcctgtttgctccccacgctttcgagcctcaacgtcagttaccgtccagtaagccgccttcgccactggtgttcctcctaatatctacgcatttcaccgctacactaggaattccgcttacccctccggcactcaagtatgacagtttccaatgcagtccacaggttgagcccatgcctttcacatcagacttgccacaccgtctacgctccctttacacccagtaaatccggataacgcttgccccctacgtattaccgcggctgctggcacgtagttagccggggcttcttagtcaggtaccgtcactatcttccctgctgatagaagtttacataccgagatacttcttccttcacgcggcgtcgctgcatcagggtttcccccattgtgcaatattccccactgctgcctcccgtaggagtctgggccgtgtctcagtcccaatgtggccgttcaccctctcaggccggctatggatcgtcgccttggtgggccgttaccccaccaactagctaatccaacgcgggtccatcttataccaccggagtttttcacactgagccatgcagctctgtgcgcttatgcggtattagcagccatttctgactgttatccccctgtataaggcaggttacccacgcgttactcacccgtccgccactagaattaaattaaatcgaccgaagtttcaataaagtaattcccgttcgacttgcatgtgttaagcacgccgccagcgttcatcctgagccaggatcaaactctctgataaaatgtttgattcactcaagataacaactagctatctctcgttttactgtttttggtttttcaaaccgctcttaaaaatgtaaagaattttcgagaatcgtatgtgtttcactgtttagttatcaaggttgtctgtcttgcgacagctttgctattttaacatgttgtcttctgtttgtcaagaacttttttaataagtttttttcaagcttcttcaacatttattcttttcaacagcttttcgagtttatcataactctttcgctttgtcaagaactttttttactttcttttttcaagaaagaacggagaaggagggatttgaaccctcgcgccgctattaacgacctactccctttccaggggagccccttcggccagcttgggtacttctccaaattgccctagattcgtcgtttcacagaaacgactttcttcacactctcgtgtctttatttagttctcttcgttttcaccgaagaaccttgtgcattatatcgcacttttcatttgtttgtcaagtacttttttcaaaactttttaagtaacttgacaagcggagagagtgggattcgaacccacgcgcccttgcggacaaacggttttcaagaccgcctcgttatgaccacttcgatatctctccatatgttgttgactgcgttcgttgtgttctcaccgccgacgcaagtgatattctagcatcaatacccgcatctgtcaacaacttttttacatttttttcaatttttatttttatcttcccagatttcccataaaacccgctaaaatacggcatttttcaatcaccaaacattctttaatgtttcaaaaatgcttccgcgatatcaagatcctccggtgttgtgatcttaatattctgataagatccctctgccagagcaacctttgcccctgtctcctgctctactaccatggcatcatctgtaattttgctcatatctttctgacgaatgctgtcatgagcctcacgtatcagtgaatacgaaaaaatctgcggggtctgaattgtccacacacactttctgtttggagtttcttttacatatccctcttcatcagaaagtttgactgtatctttagaaggcataccaatcacacatgcacctgtttccttcactttctgcagaccacgtttaagaatttcttctgtcacaaaaggtcttgcaccgtcatggatcaatacatattcacagtctctgcattcacaaagacctgcatagacagaatcatagcgttcttttcctcccgggattactgccgatacctttgtaaatccatatttttgcacgatttcttctttacagtaggagatagattcctctcctgtcacaagaataatatcctgaatcagcggactttcctgaaaacagcgcagggaataatacagaaccgggtatccctgtatctccaggaactgcttctgtactttactgtgcattctttttccctgccctgctgccagaacaatggccgtatttctttctgacatctcaacgctctcccagtttaagattcggcacagcattcagatcccagccatgacgtgtacctttaatatattcataataagcagctactccgatcattgctgcattgtctgtacagaagatcggtgacggccgataaaaactgtaattatttttcttacatgcttcttccattgccgctcttaacgttccattcgaagccactccgcctgcaattgcaatcttagtcatcccataatctttggctgcaagcattgtatgctccaccagcacatcaactaccgctttctggaaagatgctgccaaatctgctctgtttatctcttctccggtcatctgcgcatgattaatataattcaacactgctgattttacaccactgaagctgaaatcgtacggacaatctccaattttagcttttggaaactcaattgcattggggtttccctctttagagagcttgtctacctttggtcctcccggatatcccagtccgatagctcttgcaactttgtcaaaagcttcgcctgcagcatcatcacgggtacgtcccaggatttcaaattctccataatccttaacgatcacaaggtgtgtatgtcctcctgacacgatcagacataaaaatggaggttcaagatccggatgttcaatataatttgctgacacatggccctcaatatggtggacccctaccagtggaagcttctttgcataagcaattgccttcgcctcagcaacgcccacaagaagtgcacctacaagtcccggaccataagtgacaccaattgcatccagatcatcaagagttacatctgcatctgccagtgcctgttcaattacctggttaatcttttcaatatgtttacgggaagcaatttccggaactaccccaccgtataaagtatgaagagcgatctgtgaagagatcacatttgacagaatagttcttccgtttttgacaacagaagctgcagtctcatcacaggaactctcaattgcaagaattaatgtatctttcattttctgttcctcatatatcggacggataagtcatccgttttactacttgttcataatcaatttcagtgacatattattcctcaaaattcaattccagactctttccgtcttttcccggatatgcatttggaaaaatttcacgaactttatccataaactcatctggtctgaccagagatggactgtaatgtgtcagccacatctcctttacccgggcatcacgagccaaaaccgccgcctcgcggaaagtcatatgcttgtatccgcgtgctttgtctgctttgtcatcttctccgtacattccttcacagataaacagatccgattcctttgcatttcgcaggatagattctgttggtctggtatctgttgtataagtaagcctgattccttttctcgcaggtccaagtaccatctccggtgtataggtaataccgtctgcttcgatggtctgccctttctggagcggattccagtatttcagtggaatatcctgctctttcgctctctcagccgagaattttccctggcggagaatctcaagggtatatccataacagagtacattatggttcactttaaaagccgtaatacgatagccatttaattcaatgacctgctccggctgtgtaatctcaataaatttaatttcaaacggaagctccggtgcaatgacgcgaagtgcattgaccactctctccagacctttgggacctaccagagtcaatggttctgtgcggtctgcatttcccatagtaagaagaagtcccggaagcccgctgatatgatctccatgataatgagtaaaacaaatcacatcaataggtttaaagctccatcccttctccttaattgctacctgagtaccttcaccacagtcaatgagcagactgctcccgttatatcttgtcataagcgcagtcaaccatctgcgtggcagaggcatcattccaccggttccaactaaacatacatctaacatatattccctctattttccagcttccggcaattcccttaaaaggtgtatggtccggctgctgattttttctgctttcatttctttttcattcgggatgtctggtcataagcagcgcatcctccacaggatcactgtaatatgccttacgtattccatctccggtaaatcccatacgttcatagagacggattgcagtctcatttcccacacgtacttccagatggattgtcgtaacctccctctctgctgcaaggcggatcaggctctgcatcagaaaagcgccaattccttctttttgtctgtccctgcgcacagccacattggtaatatctccctcatccagaaccataagaagaccgcagtaacccagaatcttttctttctcttccaccaccagaaacatggcatcatccctggtcagaaaagtaaaaaaaccttcttttgtccatggcacatgaaaaagatcctgctcaatctccattacctgatccaggtcatccacaagcatttcccgcaggatcatatttttgtacctgccggtttctgctctttttctctctctgcacgctcacgctctgcctgggaaacgcggagatattccgggatatgttccatagcagtctctgtgcgtccttctttataataaatactgccaagagctgccactgccgctgctctctgtttatttacatgagccggtgcaaaagaatacggaacctgcagtttctctgcgatcagttcacgaaatacaggtacaccgtctcccaaaaatgtaaccatctctcctctctgattcagttcttccagcagttcctcgatcggtgctgcccactgttctttcaaagtcataagctgatgctcttcaaatctgtaaattcctgtatatacctgctttcttctggcatccatgatcggacagatcaatccctgtgcatcataaagattatatgccagtgcatctactgtcggtactgctaccaatggtttcttcagggcaagtcccaggcctttggctgttgccgagccgatacggagtcctgtaaaggatcccggtcccgctgccactgcaatagcatctacggattccagttccagttccgtcatcttcacaatctcatctaacatcggaagcaaagtctgagaatgtgttttcttataatttacagtatactcagccagtaatgtatcatcttccacaactgctacagatgcaacaattcctgagctgtccaaagctaaaattttcatttctacctcctaactgttctcctgaccaatcactgtaatccttctataatcaaagcctttctccagatctttctctatggttactttgatcagcttttccggaaggatttcttcaatcagatcagcccattcgatcagacagattccctgtccgaagaaataatcgtcatatccgatttcttccatttcctcaatgtcaccgatacggtaaacatcaaaatgatataaaggaagacgtccgctttcgtattcctgaatgatcgtgaatgtcgggctgcagataggctctgtgatcccaagccctgccgcaactccctgggtaaatacggtttttccaactccaagatcacctgtcagagtataaatctgacccggtttcgcattctctccgatcttctttcccacctcaaatgtttcctgtggtgtttttgtctctataatcatcttttccacctttttcttgcagaattgttctttgcatattataatagagcgaacagcgaaatacaatactttttgaaaaggagacttgaaactatggcaaatccgatagttacaattaccatggataatggcgatgtgatgaaagcagaattatatcctgagattgcaccgaatacagttaataactttatcagtcttgtaaaaaaaggcttctatgacggacttattttccatcgtgtgatcaacggtttcatgatccagggaggatgcccggacggaacaggtatgggcggtccgggatacagcattaagggtgaattcactcagaacagatttaaaaatgatctgaaacatactgcaggtgttctttccatggcacgcgccatgcatccaaactcagcaggaagccagttctttatcatgcacaaagatgctccgcatcttgacggtgcttatgctgcattcggcaagatcactgaaggaatggatgttgtaaaccgtattgcagaagaagataccgattacagcgaccgtccgcttgacgagcagaaaatcaaatccatgacagtagaaactttcggtgttgattatccggaaccggagaaatgctgattcgctgactgtttatgccccatgcagttttcaggctgcatggggcatattttatcagtccgtaaatactttcacttcaccgtcaatcactgaatagtaaagatctttctctttcttcatcttcgctcttccatttgttccctcggtgattgctttttctacaaatgcaatctgatccgccggaaccagcaaatgcagaactaccctgtcagtgtattcagaatcaaggatcggtaatttctgttctccggcaatatactggatcttgcctatcccggtataatccgtaactacttccatagaaattccgtaggttttctcaatcactgtgctggcggcaagaccttcctgcagactcctggaatatgctctgacaagacctcctgttccaagaagtacccctccaaaatatctggtaactactgctgccacattataaatatcttcccccaggattacatccagcattggtcttcccgcagtgcctgacggctcaccatcgtcactgcatctggtatattccctgttctttcccaccgaatatacatagcagttatgtctggcatcccaatatttcttcttcatttcctctataaaggccagtgcctcctcttcggtctgtacaggacgcactgtagcaataaatctggatttcttttccacgatctcgccttccccgccctcgtaaactgtcttatatttctcaagcatgtctcatactcctctttccgttctcttattgactcagtgtaccatgaattacaaaaatgtgccagcacagtgtatactaatcctgtaaaaaaacacaataaccattaaaaagatccaaaagcaattgtgaatttttatttttctgctttatttacttattcttatttgatataatagaacggattataaaggaggtttaacatgaactacggtaaaaagtcgactgcaaagaaacggacggcactgatttcccgttcttccatgatgggaaagcgcgccagagtttctttcatcagagtcctgttcgtatcactgatagcactctgcatcgcagtaacctgtctgggtgtggggtcattcaggggtgtaattgatactgctcctgatgttgatgatattgatattatgccactgggctatgcaacctttctctacgatgatgcagggaatcagatccgtaaactggctgctccggattccaaccgactgcctgtcactctcgatcagatacctgttgatctgcagcatgcagttgtcgcaattgaggatgaacgtttctatgaacataacggtattgacgtaaaaggtattcttcgtgccggaatgaaagctctcactaccggagatttctcagaaggtgccagtacaatcacacagcagctacttaagaataacgtatttaccaactggaccagtgaatctactcagctggaaagatttacgcgaaaaatccaggaacagtaccttgctgtccaggttgagaaaaaaactgataaagacaccattcttgagaattacctgaacacaattaacctgggtgccggttcctacggtgtacaggctgccgcacgacagtattttgacaaggatgtatgggatctgaatctttctgaatgtgcaactctggcaggtatcacacagaacccgacgaaatttaacccgatcatcaatcctgacagcaacaggaagagacgcaaggaagttctccagcatatgctggatcagaactatattactcaggatcagtatgatgaaactcttgcagatgatgtttattcccgtatccaggccgctcaggaaaagaactccagcactgagaatactgtttacacatattttgaagatgaactgacagatcagatcatcaacgacctgatgaatatcaaaggttacaccaaaaaacaggcaaccaatcttctctacagcggcggacttaaagtatatacaacacaggattccaagatccagaatatcctggatgaggaatatgcagatccttccaattatccggacactgtccagtatgaacttgactatgccctgacggttaccgatcctgatggaaatcaggtaaactacagtaaggaaatgctgcagctttattttcagaatgaggatcccgatttcgatcttctgttcgattccccggaagatggacagacttatgtagacaaatataaggcaagcatactcgccaacggaagtaaagttcttgcagagcgtgtcaatttcgcacctcagccacagtcttccatgagtgtgatcgaccagcataccggctatgtaaaagctctgatcggtggtcgtggagagaaaacggcaagtcttacactgaaccgggcaacggacactaccagacagcctggttctacctttaaaatcgtgtccacttatgcacctgctttaaatgaaaaaggcatgactcttgcaacaacatttgaagacgaaccttatgaatatccggatggttcccctgtaaacaacgcaacccgttcttacaacggaacaaccacgatccgtactgcgatccagaattccattaacgttgtagccgtcaagtgtctggaaaaagtaactcctgagcttggattgaaatatctggacaactttggttttacaacccttgctcatggaacagaggctgacaaagatgccaatggtaatgtatggagcgatgcaaaccttgccactgcgcttggcggcatcacccgcggtgtcacaaatgttgaactgtgtgcatcctatgcagccatcgcaaataacggaaattatatcaagccaatttattacacaaaaattctggatcacaacggaaacgtcctgatcgagaatactgctgccgaacgttccgtaatcaaagaaagtactgcttttcttctcaccagtgcaatggaggatgttgtaaaacagggtacaggtacagcctgccagcttgacaatatgcctgttgccggaaaaacaggtacaaccgaagcctataacgacttgtggtttgtgggttatacaccatattatacatgcgcagtatggtccggttatgacaacaatgagaaattacccgattatgcgcgtaacttccacaaagctttatggaaaaaggttatgactcgtatccatgagggacttccttccaaagaattcgagaagcctgcaagtgtagaaaagttaagtgtctgcgaggaaaccggacttcttccaagagccggctgtccggtgatcactgaatactttgacgtaggtaccatgcctactgaatactgtgaccagcatttctatgacagtgatgattatgactataattatgatacagattcctctgatcagactgacaacaccactgacactgataacagcgaaagctctgataatggagataccgacaacagtggtgacagtaacaatactgatgacaacggtaacagcggtgacgatggtactgataataccggcggaaacgatgacaacggtaacggtaacgaggatgattcctcttatcaggtcgactattattaatgcaaaaataccggtacaggagcacctccgaatgatgttcctgtactgcaaaaaatccacagtcctgtcaactcaggactgtggattttttatatattttcaaaattgattctcagatattatacttctttaataaccatacgcgcagatccgtaaatacctgcatcatttccgagagttgcaagaatgatcggtgttttcttgcatgctgtaaaagcatatttctcatagtatttctgaatacagtcgatcaatggctgtccggctttggaaacaccaccgccgataacgatggcttccggatctgtcacacatgcaaacatggcaagtgttccaccaagcatttctcctacctgtgccataacatcgcaggctactttgtcgccctctttaaaagcatccagaacattctttgctgaaagttttgtaaatttgcgaagaacagtctgctcatctgtagcagccagagttctctgtgccacgcgaacgatacctgttgcagacgcatactgctccagacatccacagttaccacagttgcaggcttccttttcttcatggttaactgctgcatgaccgatttctccacctgcaccatgagcaccgccaacaatctttccatcaacgatgatgccaccgccgacacctgttccaagagttacaagaataacgttcttagctcctgctgctgcgcctttccatgcttcgccaagtgctgctacattggcatcgtttcctgctttggacggaagtcctgtcagttctgtcagttccttagtaacttctttaaagccccagaaaaggtttaccgcacatggcacttcccctctctcattaacaggtcccggtaccccgattcccacaccgtcgatttcttctttatccagcttacgctctgcgatcttgtcaaggattgtctttgcaatatccggcaggattgcttctccactgttctccttacgtgtaggaatttcccatttctcaactaagactccgtctgtctgaaagagtccacattttacagatgtaccaccaacgtcaattccaaaacaatactttcccataatatctgatatcctccaaattactttaaattatttttcttcacgtttctttgcaaggtttgcctgaacacgtttgtacagctcttccgctgcattgtatcccatcttcttctgtctgtggttaactgccgcagattcaacgataatagccagattacgtcccggacggataggcagagaatggcatacaatcttatttccaagatactctgtatattcctcatgcaggccgagacggtcatattctttgtctctgtcccactcttccagtttgataaccagatccacagactgtgtatccttaacgctctcaacaccaaacagagttttgacatcgataataccgataccacgaagctcaatgaaatgccgcgtgatatccggtgccgaacccaccagcgtcacatcactgactttacgaagttctacaacatcatcactgacaagacgatgtcctcgtttgatcagttccagcgcagcctcactcttgccaattccgctctcacctgtgatcaggacaccttcaccatatacatccacaagcacaccatggatggaaatacatggtgccagctgtacacccagccagcggataatctcagccataaaactggaagttgtacgctctgtcacgaaagtcggaacattatatttaactgccagatcgatcatatcctgtgatggtcttgtcattgtactgaaaattacacagggaatcttgctggaaataaatctttcatatttaaatttccgttcctcatcactgagctgcatcagataagtatactctacatatccgatgatctgtacccgttcatttgcaaaatgctccagatatcctgtcagctgcaatgccggtctgttgatctccgctgtcttgatcacaatctcagacagatcaatttcaggagtcaggttgtgaagtcccagttcctgaactaattttgtcaactgtacacccttcatttatttctccttttcagttcaaaatctgaaagcccggtctgtccgctatctcaaaacctgctcatacagacataactcatttatagctgtcgtccgaaactttcatagtaaatttcacgtcttttttattatatcacatcactatatacaacttcaattacaaaaagcgagagtctttgggtaatatgtagaagaacccaggaatatttttacatattttatatttttttctcaccagtgtgccgacaagttgattcttgaaacaatcaacttgtcggtacactagctccatgaaaaaattcatagactttctgtgcacttcctgcattcatgctttctgtctctgtaagttcttccagtgatgcatctctgatattctcaacagacttaaatttccgcatcaatgctttccgcctggtttcaccgataccagggatatcatccaacagagaatgtacctgatctttacttctcagagatcggtgaaattcaatggcaaaacggtgcgcctcatcctggattctggtgatcaggcggaagccttcactgtctgtatcaatgggaatttcaagattattgtaatacagtcctctggttctgtgatggtcatccttgaccataccacagacaggaatctctattcccagaatttccaggacttttaacgcaatattcacctgtcctcttccaccatccatcaggatcagatccggcataatagaaaagctgtcaaactcatcttttccctcatgagtaaatcgtctggtaagtacttcttccatgcttgcataatcgttcggtccctgaacccactttattttaaatttgcggtaatcactgcgctttggctttcctttctcatagacaaccatggaacctacagattcaaaaccactgatattggaaatatcataagcctccatacgcctgattcccgacagtccaagccactcttccacttcatgaactgctccgatggttcttccttcttcacgtttgatacgctctctgtctttatccagaaccatctttgcattctcttctgccagctctaccagcttctctttcgtacctttcttcggtaccctgatatagactcgctgctttcttcgatctgtaagccattcctctatgatcttggcatcttcgatttctttttgcaacatgatctcacgtgggataaacggagttccggcataaaattgcttcataaagctggataatacctgagcctttgtatcgccacgcgccacacgcagatagaaatgctcccgcccgatcagtttacctccccggacaaagaatacctgtacaacagcatcctgctcccgcagatcaaggctttcatccatggcaactgcgatgatatccttatcttcctctccgtaacctgtaattttctgacgttctccgatcttctggatactgcggatcagatcccggtattccatggcatcctcgaaacgcatttcttcggaagctgccatcattttgtcggtaagcatatcaatcgtatccttaaagtctccattgagaaatttcaacagttctgcgatatttttcttatattcttctgaactcacatagccctggcatggcgcactgcattgtttcatgtgatagtacagacatggacggtccttcccacaatctcttggcagtacccgattacaggatcgcaccttataaagttttcgcacaagctcgatcacatcttttacagccccggcacttgtatatggtccgaaatatttcgccttgtctttcttcattcttctggcaaaaagaactctgggatattcctcatttactgtgactttgataaacggataactcttatcatctttgagcatggtattatatttcggtctgtgctccttgatcagattacactccagcacaagggcttccagttccgaatctgtgataatatactcaaatctggtgatatgggtaaccatctgttcaatctttgcgcccttatttctgctgctctggaaatattgacgcaccctgtttttcagactgacggcttttccaacatagatgatctcgtccttctccccatgcataatataaacccccggcttacccggaagttttttcagttcttcttctatctgaaacataaactctcctctatacaaaaaatcctgccctgaattcttttcgtatccatgagatattacagcgtaatttcctgtgatacgaaaacagagccggaaattatttcgtttccgactctgttattgtatcactgaatctctggcttatccagcgttactgtattctgtttttcctccggaattaccagatcatccagattttccggaatctcgattccacgctctaccgcatggaaaatcttcataaattccttacctgtaatggtttccctgcggatcaggtaagcagcaatcttatcaagtgcttctctgtggctgccgatcagtctcttggcttcctcataagaattatggagaagtaccattacctcatggtcaacctctgtggcagtgtcatcgccacagtttaacactgttcttccgctgagatactgattctcctgtgtagccagacccataagtccgaacttgtcggacataccgtactgtgtgatcatggctcttgccaccttggtagcctgctcaatatcattggctgccccggttgtgacagtatcaaataccagttcctcagctgcgcgtccgccaagatatcccacaagcattgcttccagttccttctttgtattgagatatttctcctcctcgggtacctgcattacataaccaagtgcccccattgttctcggcacaatagtaatcttctgtacaggctctgcatctttctgcagggcgcttaccagtgcatgtcctacctcatgataggatacgatcctgcgctcctgtgcactgaggatcctgtccttcttctctttacctaccagaactacttcaacagcttcgagaagatctttctgggatactgcgctgcgtccactcttaacagcaaggatagcagcctcgttgatcatattagccagatccgaacccactgccccggaagttgcaagtgcaatgttctcaaaatcaacagtctcatccagatgtacatttcttgcatgaaccttcaggatctcgattcttcccttcagatccggtctgtccacaatgacacgtctgtcaaaacgtcccggacgaagaagtgccggatcaagaacctccggacggttggtagcagccaggatcagaagtccctttgaagtgtcaaatccgtccatttccgcaagaagctggttcagggtctgctcacgctcatcattgccgccgccataatgagaatctcggctctttccgattgcatcaatctcatcaataaaaatgatacatggtgcattcttctttgcttcctcaaagagatcgcggacacgtgatgcacccacacctacaaacatctccacaaactcagaacctgacagagagaaaaacggcacatgtgcctctcctgctactgcctttgccagaagtgttttaccggttcccggaggtcctacaagcaaagctcctttcggcagcttcgctccgatggtggtatatttgccgggattatgcaggaaatccaccacctcctgcagtgattccttggcctcatcctgccctgccacatccctgaaagtaattcctgtatctttctgaatgtaggctttggcgcggctctttccaacgcccatcattccgccgcccttattcatgcggcgcataaatactgtcagaagtacaaagagcagaatcgttggcagaagcacactgaccagcatagaaataatttcccctgctgcatccggcttcttatactcaaacttgattcctgttccctcaagtctctccgtcagcttatctactgactccatctgattggcataataaacttcttctgaaaatcctgatgactgatgtttcggcgtgatcgtcagtgtatttgactgaagcgtaacctctttcacatctccatcatctaccatctcaataaatttatcataagtgatctcactcgaattatccttgagcatattggtaaacatggcgaaacataccagagttaccaggaggcataccagaaaggccagtatcgactgatgattcttgttcgggtcctgtctgcccggacctttattattatcaggacgattgccattcggattgttatccatatgattatccatttcattcctcctaaacgttatcgttcttattataaagagaattcgggtataaatcaactgcgagattgtgaaaattgtgtccggttgtgcatatctttctataaaccctataaaatttatatgaagttttacaaattcacctgttacaaatggctttatttgtagtatactattgacaaactgattactgctcacttcgttcccggtaatgcactccgcaatacacagaatttatgctgaccgcataaatttgcgctgtatgtcccgggatattctaaatgagcagtactaaaaatgtgatgaggaaaggaaatgaacaaatgaagataggatttgacaacgacaagtatctgaaaatgcagtccgaacatattcgggaacgtattaaccagtttggaaacaaactttatctggaatttggcggcaagctttttgatgactaccatgcttccagagttcttccgggatttgagccggacagcaaactgcgtatgctgatgcagctttctgatcaggcagagatcgttattgtaatcagcgctgctgatattgataaaaataaagtcagaggtgacctgggtatcacttatgatgaagatgtactccgccttatggaagtatttaccgagcgcggactctatgtcggaagtgtctgcatcacccagtattccggacaggaaagcgcagatgcgtttaagaaacgtctggagaagcttggaatcaaagtatacgtgctttatctgatcccgggttatccgaataatacttcctttattgtaagtgatgagggatatggcaagaacgattatatcgaaacaacaagaccactggttgtcatcactgctccaggacccggaagcggaaaaatggccacctgcctttctcagctttaccatgaatacaagcgcggtgtcaaggcaggatatgccaaatttgaaactttcccaatctggaatatcccgctgaagcatccggtaaatctggcatatgaagcagctactgctgacttaaatgatgtgaacatgatcgacccgttccatctggaagcatatggtgagactactattaactacaaccgtgacgttgaagttttccctgttcttcaggctatgtttgaaaagatcatgggcgagtgcccttacaaatctcccacagatatgggcgttaatatggccggtaactgcatcgttgatgatgaagtctgcaaggaagctgcacgtcaggagatcatccgcagatattataagagcatggaagctctggttcgcggaacaggccgcgaagaagaagtttataagattgagcttctgctgaaacaggctcatgtgaccatcgaagaacgcaaggtggttcctgcagcactgaaacgtgaagaagaaacaggtgcacctgctgctgccatggaacttcctgacggacatattgttacaggtaagacctctgaacttcttggtgcatcttcagcactgcttctgaatgcactgaaagaactggcaggaatcgatcatgacaaacatgttatctctccggaagcattaaaaccaattcaggcgctcaagacagaataccttggaagcaaaaatccaagacttcactctgatgaaactctgatcgcgctttccatcagtgccgcagataatgaagatgcgaagctagccctgcagcagattccgaaattaaaaggctgccaggttcatacttccgtacttctgtctcaggtggatatcctggagttccgtaagctgggtgttgaacttacctgtgagccgaaatctgagcatgctaagaaactgcagaaataatttctgaaatggttttcaaatagcagcagaaaactctgaaaatccacaatatctatataatgatacaagaaagaatcctgcctgaacatatgacagtttcatatgaacaggcaggaattttttatttctctataatctcaatcgctctgtccggataattggtaatgactgcttctgcacctgcgtcttttaccagctggatgtgttctggtttgttggcagtccatacgtgcattttcagtccggcacgtttgacttcttctatgaactgtgggtatttcaggtgataaactgcagggtgtacggcgttgattccgagatttttggcgtacatggctggatttacccatccgtcactgaaaaggattccggtctgtacatggtcattcagctgttttaactgtaacaggctgtaatggttaaaggaggaatagatcagctggtcttccatgttcatttcttttaccagtttcaggattttcccttccattcccggatagaagcagatgctgttctttagttcgatgtttaccatcatatctgtggtgcgcatgagctccagtacttctgccagagttggaatgtgataaattcccgatggttctgcgggtgtactgacttttaattctttcaattgagccagtgtcatatctttgatcagtccggttccgtctgtgacacggtctacgttttcgtcgtgcataacgatgagttcgccgtctgcggaagtatgtacatccatttcaattccgtctgcgccctgtctgatggcaagttcaaatgcttccagagtgttctccggtctgtatccgctggcacccctgtgtgcccatacttttgttgttctctttgttgtttctgtcatttccatatgcctctcttatataaaattcatttacagtgctttccaataacatatttttcgtcttgattttttacaaaacgtctgaatatgtcaagtggataaaattatccgctttgctacttgctcagaaccaaatatctgtttcgcaatttagttaaactatagcattaagaaaattaccgtaaatcttcataaacagggaaccgcatacgcagccccctgtcctcatttaagtataaatatttttcctgtgaatgattataacacttctcaatgtactgttatcaatatttttattcattcaacaagttataatcttcgatggatttgttcatatcagaagccattttgctcaccgcatcctctgcagattcttttccgttgagcatattctcaatctctgtttctacaatcgcacgtgcttccgggaatacactgagaagtgcacctgcatattccggtgcagaatcatgaagctggtcaatggctgtctggaactgtgggtattttgcaatgttgtctttgaatacctgctcgtcatgtgctgctgttgttacagggaagtatcctgtctgtgcattccagtatgcctgtgattccgcagataccagatattttacaaattcccatgtagctgctttctttgcatcatcctggttgtcaagcatccagagagaagcaccaccgatggatacaccacctttgtcatcatctgtaatggatgggaagtatgcggtacctacttcaaaggaaccgtttacatcctgcagaatctgtttcagggacgctgtggaacctaatgtcatagctgcttttccggaagagaaatctgcaagtccggaatctccgcctcttcctacgtttggtgcatagcctgcgtcataaagtttcttccactcattaagaatattcagtgcacctccgttttcatcgaatgcaacctttgtagctgctgcctcacgtccgtttccgttatctacatatggcagaccctgtttgcacataaactcttcgaaaaaccatccatagattcccatggataatgcttctcccgcaccgcctttgtttacaaggtcatctgcaacctctgcgattccctcaaggcttgtaggtacctctgtcacacctgctttgtcaaacatatccttgttgtaataaagaatcggtgtagaggagttaaatggcatggaatataatttatcatctactgtataataagctgtgatatttggctccagatcagatacatcatatccttcgctgtcaatcatgtcctgcattgggatcacccatccggaatcgatcatgaaacgggttccgatatcataaatctgcaccagatcagctcccatatttccaagctgggcactttttaacttattgatctcatcgtcatattctccctgatactgagaatccactttaattccatattcattttcttcattaaatttatttaccagatagtccagtgcttccccgttgacaccgcccattgcgtgccagaatgaaatcgttgttccctccggaatgtctgcctttttctctgctgccatgcaggtagttggaagaattgcgctgaatactgttgctgctgttaataatactgcgagtttacgcttcataacttacctctttcttttcatgttgtttgtttttgttttctctatttctcagccttttacggcacctgagaacatacctctgatcagctgcttctgtcctgcaatgaatatggaaatggacggaaggataatcagtactacgcctgcgatcatcaatgtaatagactgggagtctacgctgtccagcataccgataccgatctgcacagtacgcatcttgtctgatcctgtcacaagtaatggccacatgtacatattccatgcattaataaatgtgtacactgccatagctcccattgctgattttgtcagcggcatcagaatctgccagataaatcgcagattggagcagccgtcaatcttcgctgattcatacagcgaaatcggaaatgtaagataaaactgtctgaacaggaagattcccattgcagatgtgagatagggcacgatcagtacctgataggaatccagccagttccatccgctgactgtcaggtaattggaaataatcgttgcctctcccggaatcatcatagttgccatcaccagcataaacagcacattttttcctttgaaatccagaaaggaaaaggaaaacgctgccagtgaacaggaaatgatctgtccgaaagtgatgagacctgctaccaggaaagagtttactacaaaacgaaccagcggaaccttctgcagtgcctgtcggaaattctccaatgtcggatgtttgggcaggatattcatatccagagtaaaaagttcaccggatggcataaatgcaatacttactgcgtataaaagaggcagaagaacaattaacgccacgacaatatttaagacaatgtgtccggcagttctggccgctcttttatatttctgctgcgccagcatttttgcttttacttcctgaaacctctggcgttccagatccatctgtttttctttttcagcagtgatgctgcctaactgtgacattaatatttcactccttttttctcaattttaaacattaccagagtaagtaccagcacgatcaggaaaagtaccactgactgggctgctgcacttccgaaacgatagttaaagaaggcatctctgtaaatggaatacacgatcaggtttgtggattctccgggaccaccctgtgtcagaatcttgacctgtccgaatgactggaatgcctgaatgatgtttaccactaatgtgtagaacatcattggtgccagtcccggaagtgttaggcggtagaatttctggaatgaacttgcgccgtctacggaagctcgttcataaatagtttcatcaatgttacttaatcctgctgaaaaatacaggaagttgattccactgttaagccatgcagtaagaactgctacgcagatcagtgcgtatttcggatcactgacccagttgatatccagatgaaaaatcttattgatgattcctacggatggatgaagcatgatcttgaagatcattgctgctgaactggatgcgattgccattggcagtgcatatgcagtactgaaaaaacggattcccggaaatgttttgttgcagaggactgctgttgtaagtcccaggatcatactgactgcaactacgatcacaacaaagatcagggtaactgccagactgttccagaatgaggatgactgtaataattctttgtagttgccaagtcctacgaatagttttgcctgtcccatcttattcgttttaaaaagacttaagtataaagtcttaaaaaacgggtagaataagaagattccaaagatcagaaagcttggaaacaggtatgcgtaggcacctgtgttttttaacttcttcatgtattgaacacctttcctgtttttatgagttttatattgaacttttgaacaatatcattgcttatgaaaacatcccttttctcagagtgatattctcctgagtttccagatcaaatgctgaaatgtatgccatgtcgatccagagtgttactttatcgcctttatcaagcagactgtcaccggaaacttttgcacagcagtcctgaccatcgtgattgaaatgaagaattacttctgccccaagcagttctctggctgtgactgtgacttccattttccactctcctctggtatctgcttctgcgggtttttccagaaaatgttccggacggattccgagttcaatgtttcttccaacatagccctgacgtttcaggattttccataagaaatccgggattgggatgtctccgtcgttctctgtacggaatgtagggattcctaccttttccattgccagacctttgataaagttcatagatggagaaccatagatggagaaccgatgaatcctgcaacaaagcgatttactgggtaagcatacaggttctgcggagtatctgcctgctgtactgctccctgattcatcactacgatcctgtctcccagagtcattgcttctgtctgatcatgagtgacgtaaataatggtgttcccaagtgctttgtgaatacctgcaagttctactctcatctgggtacgaagtttggcatccagattggataatggctcatccataagaagtactttcggctcacggatgatagcatttccgatggctactcgctgacgctgaccacctgaaagattctttggtctttgtttcagcagattttccagtcccagaagttctgctacatgatgaacctttttatcaatctcttttttcggtacttttcttacctgcaaagagaaagcaatgttatcgtaaatattcatctgtggatagagagcatagctctggaaaaccattgcaaggtcgcgctcttttggttccagatagttgaccagtttgtctccgatccataattcaccgtcgctgatatcttccagtcctgcaatcattcgaagtgtggttgactttccgcatccggacggaccaacgaaaactaccagttctcctttttctatttcaagattaaaattctttactgcctgaaagccgttttcatagcttttgcagatgtctcttaatatgatttccgacatttgatttcctttcctctcctgcttttacgattaatatttttcactgatatttttttgtcgggctgctttggcaataccttttcagttatctttatgaaaaatatccggcaagcttccccagtgactggcaccggaaaccatttttccattcttctacactggcttcgcctgtaagcaccagacaactgtcaatgcctgcccgtttcccgcattccatatctgtatagattctgtcaccgataagcagggtctgtttcggagtgcatcctgtttcttccagacaggcatataccattccgggtgcaggtttgccgatatattccggttctctgccaacagatgccgtaatcatccggcagatggaaccgcagtccggtatcattccgaaatcaatagggcaacgcagatccggatttgttgcaaaccagggaacttttgtctctgtgagctgtttacagacctgaaccagtttctcataggtaagctctgtatcataagcgcaaagtacgcagtctacatcatctcctgcctgatctgtgatattcagacctgcttttcgcagttcgctgcagtaggtttcggtagctgctaccaggattttttcgtttccgtaatatttcttcatgaaatctctggcgtaggttcctgcagtgataaattcctcttccgtagtttcaattccccagtcatgaaactgctctacataatcactggctgctttggacgagttatttgtcagaaaccggaaaattccaccgttttcttttactgtctgaagaaagtctgctgcacccggaagaagttcacttcccagagcaacagttccgtcaatatccagaagaaacagttttttttcttttatcattgatgcaagattgttctgcatattattgatatttctctcctcttttttaactatattgctttttattgtcattgcactgtccaccgactttttgcatttaacactggagtgtgtttgaaaaatgcagattgcgggaatgatttttcaaatacgctctggcattattataaaaactttttgacatcaccaacaatcttatttttggcaaataaatgttaaatgcgcataaaaaaatcacgactgttcgccgtgatttttttacattttgattttattgctgttgtcttaattatctgtttctaccttattcatgcattggaaatgagttttttctcattttacttgaattttactttacagagattccggtctttccacctcatagctagaccagtcatcaactgtagtagatacaaatgtatctgcgctgtcctgataggagcctactgtgattgtgtaatcactgtcaccctctacataagttgttccgtctgtacctacgatggaaactgttttgccgtctgcatctgtgatggttcctgcgtttgacagggatgtgatgatgctgtcgccggttactgtccatgtagaatctttgtcaattactacgttacaatatccgtctccaccgtttcctgcgttggattcgtcattgacaaacgcaccttccagtgtgctgccgttggtcatgtagaaatcaaggtcactgatggaatcccagattacatttcctttcatatcctggctgtctgctgtgaaattgcagtcagatccgttagcaccgctctggccccatccacgctggttgttatttcctgtgcactgcaggaagaattcattgtcatcattgtatgtgatgtctacgtcctttaatgtgatagtacattctgtatttgttgtatagaataagccaccattcttggatgtgatcgttccaccatccatctggaatgtactgttacctacttcagaatcaccggacatactctgataaagaatgactgtccatgtggtatcattctgttcatcatcactcatatttccggtcagattgctgttatagagtctcagagagtttaatccctcgatgcagactgcttctgaaccatttgctgtcaattcagcattattgactgcaatatccgctgtacagtaaaccgcaggagagcctaccccgttagatgtataagtacctccgtccactaccattgttccaccgcctctgtcactgcggattgccgcggaggattcgccatttgtctctacattcagatcccaggcatagagcttgccgccacctgctgcgtggattccgcctgaagtatcctgctgtgtggtgatatctgtatctgctacatatacagttccgtcaccgtatgcaaagagtcctgcaccgcctttgctgtctgtggttactgtactgcctttaacatatgcagttccgtctgtggcaagaactgctgcacctacaccatagaagctggagttatcaccgccctggctgtcggaagatgttcttgagattgcgtcattgctgaaggtaacctctgcaccattggaaacaagtgctgcgttttcgtctgttcctgtagattccagagtggtatcggagactgtttcatctgagctgtattcatttgctgcatcgtagctgtctacaccggaagcctggccgccaggaccaccctgtccgcctcccatatccatggactggactgtgatggttgctgcgtttccgtcgtcatctaatgtgatagctactacgtctccctctttgatgtcatctaatgtaatctcctcggtctgacctgcaacatctgatgctccctgactatctggtgcctgaccgttactatccggggcttctccctctggtttctccggagcctctccaccagatgctccctgtccgcctcccatggactgtttcgtaatcactgtgctgtctgtaactgtgatttcctgttcttcacctgtcagatctaacatggatggtgcttctccgtccggagttccctgaccatcaccgttaccatctggagcttcgccttctggtttttccggagcttctccgttctcttcgccctgaggctgttcaccaggatgtgccatttcttttctggttcctactgcaatggtgatttttccatcttccacagattttacttcaccgagaatttcattttcctttgtttgctctgtatcgtcattctttttttcagcatcctcatctgatgtttctgctatatcctctgtagtatcacctgcatcctgagtactttctgtcttgctctcttctgcaaatactgttgctgtaaagcccacagatgttgctgttatcataactcccatgatcattgccagatgtttatattgcatagtaatacctctctgttctttctattttgaattttctctgtttcttttgtttttgttgatggtattactatatctgataaatatgtttgatctatggtcagtctgcgaaaaaaatgtgttctcctataaatggtacatttcagatttgcggtgttttaataacggaagctgctctctgatctggtcttcccggtccaaatctatttcttctattaaaatgccctctttctcatccaactgtttcataacctttccccatggatctgttacaatagaatgtccccaggaaatatatcctgcctgtgtatctctggcaggagcacatccaagcatgtagatctgattgtcaagggctcttgcacgaaaagtcagttcccagtgtgccggacctgtggtcatattaaatgctgcagggacgaaaatcatccttgcaccgtccagtgccattgtgcgggcaaactccgggaagcggatatcgtagcagatcatgacacccattttcccaaattcagtatcaaatactgtggcatgatctcccgaagtcagagtatctgattctttaaagtactggccattttttacattgatatcaaagagatgagcttttctgtgcttaccaatctgttttccatctctgtcaaaaatataagaagtgttgtaaacctttcccacatcatctgcttccggcatggaacctgcgatcagataaatatgatactttctggcataatcagacattgcctgccaggatggaccaccttctttttctgcataaactggaaaattttcggtctgatacggacagcagaacatctccggaagaattacaaagtccggattttctgcctttattttttctatataagtgccggcagtacggatattttgtattttatcttttactgtgggcatctgaattgctgctactttcatgtgtatcctctcctgttttaatgacatggttttcaatctatctattatagcgataaaaaatgcagtggcaattatgttagataaagttaacacttgactacaaatcttaaacttttaacttaggtcaaatggctcagtaaaaaaattggctaagaatactaaaattccaaatcaagtcaacagctcacccaaaaagagttgactgtgaatactaaaaccataaatcaagtcaatgacttacccgaaatgagttgactatgaatactaaaaccataaatcaagtcaatgacttacctgaaatgaattgactatgaatactaaaaccataaatcaagtcaatgacttacccgaaatgaattgactctgaatactaaaaccataaatcaagtcaataacttacctgaaatgaattgactctgaatactaaaaccataaatcaagtcaatgacttacccgaaatgagttgactctgaatactaaaactctaaatcaagtcaataacttacccgaaaaactcagtcataagtaggattataatttaacaacatcccccacgcatgaacattccttccatgtgtgggggatattgattttccgcaggtaagttgctaaatgcacctgcattcagttgatttaattaattattcttcataaccattcgggttattggactgccatctccaggagtctgcacacatttctttaataccgttttcggctttccatcccagttctctctctgctttggaagcatcggaatagcaggttgcaatatcgcctggacgacgtggcttgatcacatatggaattttaacacctgtagcagcttcaaaattcttcacaatatcaagaacactgtaaccttttcctgtaccaaggttgtagatacttaatccggaattatcttcgattttcttaagagcttttacatgtccttttgcaaggtcaactacgtgaatgtaatctctcacaccagttccgtccggagtatcataatcatttccgaataccccaagttctttcagtttacctactgcaacctgtgtgatatatggcatcaggttgttcgggattccgtttggattctctccgatagttccgctcttgtgagcaccgatcgggttaaagtaacggagaagaactacgttccattccggatctgctttctgaatgtctgtcaggatctgctcaagcatggattttgtccatccgtatgggtttgtgcactgtcctttcgggcactcttctgtgatcgggatgattgccggatctccgtatacagttgcagatgaagagaagataatgttctttacattatgttttctcataacatctaccagtgttaaggttcctgcaatgttattttcgtaatattcccaaggtttggcaacagattcccctactgctttcagacctgcgaaatgaatacaggaatcaatatcttctttatcaaaaatttcatttaaagcatcgcggtccaggatgtctgctttgtagaatttcactggtttgcctgtgatcttggaaactctttccagagatttctcacttgcattgcttaagttatccagaactacaacatcatatcctgcgttctgcaattctacaactgtatggcttccaatatagcctgctccacctgtaactaaaattgccataataattcctcctaacctgtcttcctgctacaatacctgttttttgcaatttctgtttttttctctttcaacaatacctatattagttcacagtatcagaaatatccttgataattctgagtgtaatctataaaattctgcggatatcctgtttcacatctgcaaaatttacctctgtattttacagcaccctatattcagaactgtaaaataccgtttcctggcacatcatgtattgtagaaaatcctgcgaaaatatgatttttctcatatccccgcaggataattctatccgaatcagttcataaacacaagtctttatggacatgtacatttttttatacctgtttatacttatttacaatctctttcatccgggaaagtttttcttccatgtctttcaccagtttgaactgtgttctgcaacgatccagattatgtccctctctgtgaatcttgaaataatgatctccctccagatagtctgtgaggaaacgcattccacattcaaaggtcataaggattgctcccatgggaagcatatccagttctgtctcagtcagtgcaccgccacaaccttcaatgaaacctttgacataaacttcatacaagtgaagatcacaggacaccttcgtcagatctttctcatcctctgctccggtacttgcgccaaaacggatagaatcgccgaaatcatttacggaaagtcccggcattacggtatcaaggtcaatcacacagatggcttttcccgttgcattatcaatcataatgttattcagcttggtatcattatgtgtaacacgcaacggcagctttccctgatcctgcatatcgcacagaacatgtgccagttctgtgcggtccagaacaaactgaatctctttttccacatctgctgctctgtgacatatatctttttccacagcagttttaaacttatccagcctgtccaccgtattatgaaaatttacgatggtctcatgaagcgtttctgccggatagtctgcaagcaacctctggaaatgcccgaaagcaactgcactctggtaaaaatcttcctcatcttttaccatatcatagcatgttgcattttcaatgaataaatatactctccagtattctccgtcctcatctacataataaggaagtccatcctttgtcatcacaagattcagagtctctctctccacatctccaccgttttcctggatctttttcttcagccaggcagtaacaccgctgacattctccatcagttccacaggtttggtaaaaatactcctgttcattttctgaagaatataatgtttgcctgtatcataagtcaggcggtaagtgtcattgatatgtccgcttccataaggaatacattctgtcagattatcttccagaacaaatgcactggtgatattctttatttcccggttaatttccactcaattattcctcccataatttctgtggatacagccctccatcttttaaattctgaatggcagctactaccacaggtttatcttctttgtaagttacaccataccatttatccatagatttcagaacttttacagttgctctcttctcaccgagaagttcatctactacaaatggcaggaaatattcgcatttcagcgggtttactttcagattctcatccaggaatttaggaaatctgtctttcagctctttcaggatacttgcggaaaatccccacatattcatggatactgtactgccttccggaagcatagtccatgtttttccatcgtcttctgtataagctgtgccgccgtcatgcttttcgatatgggtacgctcgttgatcttaagaagatgtccttcttcatctgtaacgcacacacctcttgccacatggccattctctgtcaaagtattttccagtttatagccgaccatcatatatctgtaagtatctgcggtatcttcgttctctgtcaggaaatcatatgccatcttaaatgcatggcttccataatagtcatctgcattgattacaacgaatggtccgtcgatttcattgatgcagcttaatacggcatgtccggttccccatggtttcacacgtccttccggtacttcatagccttccggaatattgtgaagattctggaaaacatatgatacttccagctgattgctgaggcggtcaccgatggcgcttctgaagtctgcctcattttcttttttgataataaatactactttccggaatccggcctgtactgcatcataaatggagaaatccatgatgatgtgtccctctttgtccaccggatcgatctgtttcagaccgccgtaacggcttcccatacctgctgccataactactaatactggtttcttcataatttttttcctcttttctttaaatgtttttcgttactctcagattacctggtaactttttacattcatcttatcatactatgatttcgaggtcaaaacgtgttacataatacctttcacaatcgcaaacgttactgttcactccgttcacagtaacgtagccaaaattcattccagattgcctgcggcaatggaattttggcttgtatgtctcgggattttggcatattcatgccaaaacacctcgcgggatagtggtgtgtgaacagtaacatcgcaaacaattgttattgtcctgctgtcctctaatattatcctttaatgccaccggtaacaccaccgatgatcttctcagacaggaaaatatacagaataaatgtcggcaggaatacaatgatcactgctgcaaacattccggcccagtcacctgtatatttcatggagttgatcattccataaagtccgggtgcaacaggtttcagcttatccgagcttgcgaagatcagtgacaggaaatactcgttccaaatattaataaagttaaagattgttactgttacgattcctgactgtgccatgggaaacatgattttccagaaagtacgcatgggagggcatccgtcgattgctgccgcttcctcataggtcctggaaatattgctgaaaaatgtaagcaggaaaatggtcgtataaggtacattaattcctacatacaatatgatcagtacagttcttcctgcagccacattattcaggattcccataccggaaataatgctgaaaaggggaagaacaaccatgattgccggaacacccatggcagatacgaagctggtctggataaatttgtttgcaataaaatcaaatctggacagtacataagctgcaggtgcacacaccagaatcagtattgtgcaggaaattactgaatagatcagagaatttccgaagaagcctgcaactccggcaccattccatgcttttgcatagttttcaaaatgtaatccggactcaaacttcagggcttttccctggaaaatttctgctgttgtggaaaaactcgccccgaatacccagcccagaagcgcaatggtaaagattacccagagcagcaggatgatgtatcccggcaggagtttgacttcttttttcagattaaagggtctgcgtgcctctttttcttttgccatttctcatccctccttagaattccagatcatcatctttgatcactctgttacagattgtaaatacaatgactacgcagacactgagcagtacaccgatggcagctcccagacctgcatttcgttctgtaactgtattgccgccgccaaaaatctgcatatacatataaacataaggggtaattgtctgtgtgtctgcagttactgtggagaaaagctgtgaccatacaaaaaagcctacactgcttacagaccacatggtaatgtttgtcttaaatactccctttaacaatggaagtgtcatgtaacggaactgtgccggtttggtcgctccgtcaatggttgccgcctcataatattcgggactgatacgctcaataccgctgagccagatcagcatatggtatccaaccatgccgaaacaatatgcaaacaacagtgcccagaatttgtggtcattatccaggaactggatctttgccagattgtccagatgcagtgctgtaaaaagctctttcaacaagccatatcttggactgtatacatactgcagccacatagtagcaagcgctactgcactgacaatatttggcatataaatgatcgcgcggaaaaatttctttcctctgattccactggtaagaataactgcaaataaaagagacaggctcattaccaccagaccgccgatcagccaaatacgaaacaggttaaaaaatgaagtcttaaataagctggtactcatcagctttgtatagttgccaaatcctacaaatttccataaatccatggaatctgtaactccgtcgatcttgaaaaagctcatgatcactgttctgatgatcggatacagaaagattcccagaaacagcagaactgccggagtcagaaatacaacgatcatcgttttattcttcttcaaataaatacctcctttgtaagttataccatatctacggattgctacgcttcgctcccgcaatcctccagccattcggaatccgctgatttacttcgtaaatcgctacttcctcatgtctggcggtttccaagtctaaaagtcttatcgtgcaagcacgaacgactttttgcctttgaaacctggatattcaaaaagacagatggcggcagcgtagatacgatgccaccatctctataaattctttatttatttcgctgcgtcctgcatagtggaaacaaattcatctgctgtaatggaacctgccattaatttgataaagttttctttgataaccggagtcatatctacgttggattctacaccgcatgcccatgtgaaacggtttgtgctctgctcaataacaggttttgcacactcaaccattgccggccattctgtgtttgttgtatcagccgggatacctacagtttcatctgcaagtttctggtcgtattcaccttttgtaaggaatgtgatcaaatcaaaagcttcttttgcaagttttgtatctttgttaataccaaatacctgtgcaccaaagttgtttgtttcgattccgtttgctccgtctgtaagtgccggatatgcgaagcatccccagtggaagtcaggacctgccatctcttttacttcgtttggtaaccaggagccattcagatacattgcagctgttccaagtgcaagctctgtgttctgacctgcaggccatacgttggaaccaaccatctctgaataatatccgttagatgcaagttcttcgatatcctgtgccatctgaagaactgcaggatcatcccattcaccttcagttacgatctcttttactttatcttcgccaaccagtcttgcaagatgatatccgatcacacatgttgcataggcatcatccatagtcattggtgtgattcctgcatcttttaatttctggcatacatctttgaattcatcccatgtcttcggttcttctgtgattcctgcctgctcaaacagatctttgttatagaagaaagcaaatacgtttggctgatatggaattgtttttaatgtaccgccgccggcatcacggcatgctgccatcagacctgcatttgcagttgcttcatagtcattctctttcgcaaggtcttccagatccagaagatatttaccgtacattccgtttacacggtcgatatcttcgtcaaaaatatcaatctgtgtgccgccgtccagtgcaggctgaagtgcttcacggtttccggtacgtcccttgaactgaaggtctaccttaactcctgtctgctctgtataagcatcaactgcttcctgaatcacctgtccctgtggctctgtagcttcccacattgaccagtaaactaatgtgtcatctgctgcctgaacagtgaaagccggtgctgcaagtgaaccaaccataaccgcacataatgttgcactaagcatctttttcttcatacccataaccttttttcctccttggtcagttttgacattttgtcttcttttttctctcttttcgctcttttgttgaatttcaacaattatttcttttggtagtttttattttatcatttttgcacaaatagtatttgcacaaacgtccatttcttttgtacaaaaattcattttcaactggtttttcatctgtttttgttgtatacttgtacacaacaaccatattgcagttttcggacaggctaagggaggtggcagtaatggcttttgagagtatgtatctggaagaagatattcatattgaccggatttatacaatccactattttgaatacaaaagcgattttcactttgcaggagaacgccataatttctgggaatttcaatgtgtagataagggaaaggcagaaatagagacagataacggtatctaccatctgacaagcggacagctcatctttcacagaccaaatgaatttcataaccttattgccataggaaataccgcacctaatattgtggtagtttcttttgaatgcgattctccatgtatgaaattctttgagaaaaaattgctgaaactttctgattctgagagaaatctcatgggaatgctaattgccgaggcacgccgctgtatcaaaacccctctggatgatccttatacagaaaagatggaaaagaaagaagattttttgtttggttctcagcaacttatccgcatttaccttgagcagatgctgatctacatgattcggagaaattcttctcctcccatgactgtacctgtcagccaatttgtgaatctgaaaaataattccgctgtctataagcgtgtcattgcttatatggaagaccacatccgggaaaatattacactctgcgatctgtgccatgacaatatgatcggacgctcccagcttcagaaaatatttcaggaacaacatcagtgcggcgccatggatttcttttcccggttaaagatcgcctatgccagacagctgatccgcgagaaccagatgaacttcacacagatttcggaatttctgggatactcttccatccattacttttccagacagtttaaaaaaatttccggaatgacacccacagaatatatcacatcaataaaggcgctctcagaacgagagcgccagtaataccagaccaatattttcataatgttgaacagcctttttcttatttcatattgctgagattctctataaattcatccgatgtttcttctaatcttgtaagcttcagaagttcgctttgtatctgttctttataatccggatctgcctccagacctgcagcccacatgtacggctttgacatctctttcatatacggtactgcatctgccagcacttccggccattgtgtattgtccgtatctgccgggatggagttaaccgcatctgtcattttcatatctgtttccccggtacagatggaatatgcaaaatcaaaagcttcctgtttcatctgcgaatccttcgtgactccaaatccctgtgctcccaccataacaccttctgtgccgtctgttccggcctttactgcaggccatggaaaaaatccccaggaatcatcagattctgtagcttctgtcacttcattcggaacccaggagccttgcagcaccatgactgcctcgccatctcccacttcatcctgaccttccggatgctgtgccggtgcactctgactcatatatcccgcaaaaaacaaaattctgatatcatctgccgcctcttttgcctgtggaatctgtgaccagatacagttacggatcagctgctgcactttctcctgtccaagatatctggcaagctgatatccatacagaagattcacatactcttcatcgcaggtcatggcactaaggccactgtcactgtttttaatcttacggcatactctgatcagtttctcccaggtatccgggatatcctgttctgtaagtccagcctcttcccataaatccttattataccagacgcctgtgatataaggctgatacggcattgcaagcagttctccatttccccagttcttcacctgctccaacagtaccggcataatatgcttctcataatccacagtatctgccattccttttaattctgccagataatccctgtgttcctgagccatcctctgataatcatcatcaaaaaggtcaatctgttctccggcatccagggcaggttctatcagagaccggattcctctgcccttccactgaatctctacagaaatacctgttgcttcttcataagcttctgctgcttctctgatcacatctgcctgtggttcatcttcttcccacatggaccagtatacaatactctgttccggaatttctgtgatttcatctgatgctgatacagtaaccgctcctgttgcgaacagcattgacaaacagctcatacccgctgcaatgcttctccatttttccatactgaaaataccctccattgtctctcagacttgtccacatgaatttatttttgtacctgcttctatagaggaactgtctgactttattttctctaataatcacttgtctgtcaatccccaaaattcacctgaaagcaatggaaacaagagttttacttatagcaattccataaattactgcaaacaatccagtccatcatagcgtgaagtcctgcgtcagatatctttgctgtgcgtcagcacgcctgcagatatcttccttgtccttcgcattctgctgaactgtcttgattgcattattttatggaattgctatagtctgatcaaacagaatttccatcttcgttcccttacccggctcactgtccagaagaatcttcgcatgatgcaaaactgcgccatgttttacaatagaaagccccaggcctgtacctccggtttcacgtgaatggctcttgtccactctgtaaaaacgctcgaagattctctgctgttcgctctccggaattcctattccgttatcttccacacgaaaatacggtttcccattgagttttcccacaaaaacctttacatctccaccatccggggtatagcggatagcattatctgtaatattgtagaacatttcatataatacatggcgtactccctgcatctgtgcaggtccgcctgtatattccagattaatctttttctttgctgccctgttctgcagattgttgatcacatcttccccaagctctccgatgtcaacctgttcaaacatagtttctccgttcttctcatccagtctggaaagctgaatgatatctgcaaccagatttgataaacgctcggactcatgaaaaatcctgccggaaaaatcctgcatcttgtccggcggtaccattccattcatcataagctccgcatatccggaaatggacattaacggcgtttttaattcatgagaaacatttgccgtaaactcttttcttgcgctctctgcattcttaagatcttccagctgtttctgaatctgtctgttctgctgatccagccgaaaaagcaatggccttaattcttcgtagcatacatgctccagaggatgttccagatcaatccggttgataggctctatcagctttctggtctgtttctgcacaagaaaaagttcaattacaaggatcacgcataccagtccgccaagcagaagaaagctggttaacattgttaccagaagactgtctgtagtcctggctactcgcagaacctgatcatcctttaattttacagcatagtaaaacgtctgttttgataaggtgtctgaatagcgtaccatctcaccggatccctgcttctcagcttcaataaattccggtctgttactgtgattttccatttcttccggattctcaatactgtcaaacaacacctgaccatcttttcccaaaagagtgatcctgctgctggtggcgtctccgaccctgtctgagagaaaaacgtctccgtcttcttccagacctgttttaatatatgcggcttcatctctgacaccctgtttcatataaatatcatatctgttatacatgacagttcctgctgccaggaatgtaagtattacggataaaataataagtaaactggtgtgactgaatattttatgcttcatttttccactcctgttttcgtcggttttatctgttatgcgccgatcctgtatcctacaccccggaccgtttcgatcagatctcctgcctctccaagtttctgacgcagggttctcacatggacatccacagttctggtttcaccgtcaaagtcatatccccatacatggcagagaatctgatttcttgtcataacaagtcctttattctccagcagatactgaagaagttcaaattcttttcgggtaagatcgaccttttcttcccggtaatgcacctcatgacgtcctacattcagataaagctcgtcgtaatgcagttccttgtcttcattctgacgggcacttcgtctgagaactgcttttactctggcaacaaattccatcataccgaaaggcttggtaatgtaatcatccgctccgccttccagaccttttactttgtcaaattccgcttcttttgcagtaaccataattaccggcacatcctttacagatggcatacttttcagctgttccagaatggtatagccatcatctcccggaagcatgatatccagcaggatcagctccggtatctcttctttcagcgctttcatcagttcattgccattgccaaaccccctggctttaaatcctgttgtttccagtgtataaataagaagctccctgatattccgctcatcttctacacaatagatcattctgctttgcctcccctttatttatcacctgctttgtcgtcacaagtgtatttcttttttcagtatacttatttttttatccctgtacaagtaaatatccggcatctgcttcatttctttaaaacaaaaatccggccattttctctgaaatatctctctcagatacttcagagtgcccggatttcctgatcatgcaaataacatcatccgttactgttcacttcgttctcagtaacgttgccaaaattcatgccaaaacacctcgcgggataatggcatgtgtacagtaaccatcatctacctgtttatttttatgaaagctgatatttgattcgtgcgtcttccagttcatgataaaatgtttcgtccggatggctcttgacgatattcagatgactgtgagtatcatacagatcttcattcacctgcgtcacacagactccaatattggaacaatggtctgccacacgttccagacaggttgtaatgtccgaaaggataaatcccatctctattgtacattcaccgtttctcagtctctgtacatgacgacgttttacttctttggaaagttcatcaatcacttcttccagtggttcaattttctccgcaagcttcatatcctgtttgtcaaaaacttcatatgccgtatttacgatatcttctactgcctgtcccagcacttccagatctttctttgcattttcggaaaatttcagtcctttttcataaagctcctgtgctgattccataatatttacagcatggtcggaaatacgttcaaaatccccgatacagtgaagcataatggaaaggctgtgactgtctgcttctgagatatctttgtggctcagcttcaccagataagttcccagttcatcttcatagcggtcaaccttggattccatgttttccacacgttctacgccttcttcactgtatttatccaccagactcagtgctgtaaacagtgcattgtgggattcttctgccatttttctggcagcattgcggctctgctctactgcaaatgccggtttctccaggaaacgaggctccaggatcataaactctctgtcctctgctgaaacaacaacatcctcttttttgtcccggattgtaagacaggcaagtttctccagtccctttgcaaaaggaaggagaatgattgttgcagtaacattaaatacactgtggataacagcaattcctgccggtgttgctgcctgatggaagaaagaaaatccaacaactgcatttataagatagaatacagtcataaagataaccgtaccgatcaggttgaaatacagatgtactgctgctgcacgttttgcattcttcttggctccgattgcagaaaggattgcagtaatacaggttccgatgttctgtcccataatgatcgggattgctgcactgaacggtactgcacctgtaagacacagggcctgcaggatacctacggatgcagaagatgactggatcactgcagtaagaagtgcacctgctataacacctaacaacggatttgagaatttaagtaacaggtttgtaaattccggcacttctgcaaggggttttacagcagaactcatcatatccataccgtacatcaggattgcaaaaccaataaaaatacttccgatatctttcttctttgaatcattgataaacaaaataaaaatcacaccaatgatcgcaagcacaggggaaaatgatgttggtttaaacatctgaatgataaaattatcactctgtattcctgtcaggcttaagatccaggaggtgatcgtagtaccgatattggcacccatgatcactcctactgcctgtgataatttcatgatccctgaatttacaaaacctactaccataacagtcgtagctgaagatgactggatcactgctgttactcctgctcccaaaagcactgcttttatcggatttgaagtaagattttcaagaatcttctccagctttccgccggaaaccttcgcaaggccatctcccattgcattcataccatacaaaaataatgcaaggcctccgatcaatgttaatatactgaataaatccatgattattctccttttcccttttcataagtatatggttatttaacttgtttcccatcataaccatgctttgtaaaatcatccccatgagaatgttaaatccatgtaaaatttccagtcatcatattcattctgtgtaaggttcccataaatccatccgtatttttgatataaaaataaaaagaaccattgcaggagatatgacactaaccggtgttcatctcttacaatagttcttttatcaatccggatcctatatttcgacagtattattatcagaatccgcggatttcttcatcctcggaaccagtcttatcaatagaacggatttccaggaaataactgtagttatcatttacctttacttccactctgtctccaaccttgtgacctttcagagccataccaatgggagattcaatgctgatgcggttttccatggagtttcctcttatggaagtaaccagtttgtatttctcaatctcatcgtcttcctcgaaatatacctctacaatatcatccattccaacttcatcgtctttggaatcatcagaaacaatggttgctgttttcagcatattctcaaggtagcggatacggctttcattctgattcttatgcttcttggccgcataatactcaaaattctcactcaggtctccctgggctcttgcttcttttacagcttcgattgcctcttttcgtacaaccagcttgcgatggtcaatctcctgctggattttctcaacatccttctgtgtaagcttttctttcatgactacatctcccttttactattttccaagtcgtttctctttcatatattgtgccatttcatcagaaatattgtcaatcagataatttttactgctctgacgtttctcatgccattgctggcggatctgattttctgtagcttttatttcatcccgaagacctctggcagacatacggtgggcaccctgtcccatgatgatgatctgctccagtccatcggatgttgctaccgttacctgattttcccggccaatcttatggaccgttttctcaatgtactgatccgctgtctcagcttctttggtgtagactacatgaatgttatgataggtgatcacttcctctgcatggccctctatcttgtaagcatcaaatacaagaattaacgtacatttcttaaagccctgatagttgctcagaatatccatcagttttgtctgagctgcatggaggtttgcatctgccagctcttttaaatcttcccaggcatagatgatgttatagccatctacaaggagatattctttttctttcttcttagcagaagaactgttgcggtaatagctgccgctgtcagattttgcagaaaatgttctcttaaactgtggttctttgtaacgcttgaccggtccgaatgtgcgctcaaaaattgctttcagttcttcttcatcctcatagcttcctacaccggcattcctgggtggacgataacctgaatctgtctgattgttactattcctgtttcctgctatactttcttcactatccggtatggtattccccagttcagactcgtcaatcccttctaagtgcatataatcctctacttcataccatggcaccacaaatcctgctccatgagcacagaatacagaacccgtgggattgtccaagtcacgttcggaatcatatccaatctcctctacaatttcatcctgattctgacatggggcatagcccttcaatgaacagaataatctgccccgtccctttgtataggaggttacctgtgtctgataatctcgcatcattgatacaggtgcactgcctttcagaaccatcatatcatcctcatctgcttccggctgctggaaagttccattcattttctgaatgtcagtcatggcacgccctatcatatcccccggaatctcaagtctgaactcataatatggctcaagcagtacactttttgctttctttaatccctgacgcacagccctgtacgttgcctgccggaaatcgccaccctctgtgtgtttcagatgggcgcgtcctgtaatcagtgtaatctgcatatctgtaattggagaaccggtcagtactcccgggtgctccctttcttccagatgagtcaggatcagacgctgccagttacggtccagcacgtcctcactgcatgcagtaaaaaactgcagaccgctccccggctctcccggttccagaagcagatgtacttctgcataatgacgcagcggttcaaaatggcctacaccttctaccggctctgcgattgtttctttatatacgatatttcctgtgccaaactctactgctacatggaaacgctcccagatcagatgctttaatatctcgatctgaacctcacccatcagcatggcatggatttctccaagctgttcgttccatacaatgtgaagttccggttcctcctcttccagctctttgagtttcttcagcatctggtgaacatcacagtcctcgggaagcagaatcctgtaatttaatacaggttccagaaccggcatttcggattcccgttcaatcccaaagccctgtcccggatgtgtctgggaaagaccggttactgcacagatagttcctgcaggagcctcctttgcaagctcaaatttcgcaccggaatagatacggatctgatctgccttctctgtatctgtgagaagttccttcaccttcaatgttccacctgtgattttcatatagcttaaacgattgccctgatcgtctctggcaatcttgaatacttttgcgccaaactcggatggatattctggtgtctcacagtatttttccaaaccatggaggaattcttctacacctgtcattttcagcgcagagccaaagaaacatgggaaaagttttcgctctttgattacttttcggatatctgatgttgatatttcctctgtttccaggtatttttcaagcagttcctcatcgcagacagaaacatcttccagaaactgagactgcagatctgatttttcccaggtgaaatcaacgcaattatcacttaatcgcttctttaattctgccaaaagtttctctttatcagttccgtcctgatccattttattgataaacaggaacgtcgggatctggtatcttgccagaagtctccataaggtcatggtatgtccctgcacaccatccgctccattgattacaaggatggcataatccagaacctgcagtgttctctccatctccgccgagaaatccacatgccccggcgtatccagaagagttatccccctgtttcccagttcaaactccgcctgcttggaaaaaatcgtaattcctcgttcccgttccaggttataggtgtccagataagcatccttatgatccacccgccccagcttacgaatctttccagtcaaatacaaaatcccttccgacaacgtagtcttaccggcatctacgtgcgcaaggatacctacaacaagtttctccatagtatatttaaaagctcctttttctttatgaattgatatataagtattggcttaaataaaattaatcgtttgtatcaattaaagaactattttaacataagaatctatataattccaatatggttctactttaataagtgatccggcattgaacgcattgagcgcagtattctttacattccaatatggttctactttaatcgataacaccatagctttctttatatgtcttactccacctttatatccattttttcatttacccatcctctgatagtttcttcactttcgcaaagaatcctggctaccttttcaattgaatctccctctttaaaaagggaatttgcaattttacgtttttcctcttctcgtccaatctttatcccatcattttttccagcttcgtactcagctttcctgagtttccttttttcctcttcctcattgtattcaaatatactcatagcaactacctccgctcgattcttttgcagaaattctttgagaattccctcctgaatgctttcgctcactgcacgttctactgccgtattcagttccatttcattagaatatctgcgtactttatcaacatactgagcatattctcttagcgtccggcattcttccattagttttttattatgccctacattgatatttaatgtgatgacctttagttcaagatttggttctcctgacatattttcatacgattctgacagataatctacccacctatcttcttttttctctgttccattataaaatacgataaaattcggtgtgggtattctcagtcttgttgaggtatacaaggacttccaatccaccattttctgatattcgctggaaatgtagaataagtctctcaaaggcatgttcgggttatacgtagactgatgttcatacagaaacagattcgtatttataataaacgccagatcattcttcattcccatatagattgcgttctcaagtgtcacaatctctaattgagcagcatctgtataagaagtttcattgattgcattatacagcgacaacagattctttctgtctgaaaacagcatacggaagactgtatctttgtacttacggtttgcagttgctgtgttgcctttcaatcggtttcttttcacaataatttttttgttctttctttttgccattggcaatacctcctgttttccgcaggagtcaaagaacattttgtgctattcttatcacttctcagctcctgcttttcataattaactggaattaaaagcatggatttctgaattgagattagaataatcagacggcaaaaatgccttgaaatataagagaaatatgctttatacttatgttagcattacttactcttattttcaaggcattttatattctttttattttataaattatatgggagttactgttcacacaccactattctgcgaggtgttttggcatgaatatgccaaaattccattgccgcaggcaatctggaatgaattttggctacgttactgtgaacggagtgaacagtaacgtatggaaacttttttattccttatgtgtccctctgactactttgattccacgttcttctatcatattgcagatctgtgtcatccttggacattcatgctttccatccgggagacgacagacacctacgtggatggtactgattttttcactgaccagtctgtctatcttttccaggattcctttgtcttctatgggttctatcgggttgacgcctttgcattcgttacaggtcatcattgctgccagacaggtatcttccggataatcctgaaagaaatcggttctgttctgaaatgctgccaggcatccaactctggcgcatacattattagaatgaatacacggtgacatgctctcgccacttaaatcttacagattttgaagtgggagcttcctgctcaattgcccttcagggcaaagctaaaacaggctatccccgcgtgtcccgcggttcttttttatccggttacggatcttttctgtgctattatgcacattttttatatattctttttccttcttccagaatattgaccgccgcattcacatcccggtctatccggtttccacattcgcacaggtatgtccgttctgataatgccagttctttctttttatgcccgcatacactgcatatcttgctggatgcaaaatatctgtctacttttatcagatattttccacgttcttccagcttatatccaagcatggaaaggaactgaccgtatccgttatcctgtatcccttttccgaaatgcaggcctccggctatccccttcaggttcagatcctccacacatactgcgtcatagtcttctgcaaggctgtggctgagcttatgctggaaatccttcctctggttctttatcttttcatgatataaagcaacctttttcttctgtttctgatagttacggctgcccttttcacatctggaaagctttctctgttcacgggcaagttttttctctgcattccggtaaaacatgggatatccggctctttcaccggtagaaaatacacacatcccatgcatggcaaaatccatccccaggaatttttccgcctgtcttttctccgctgtttggttttcacagtcgaacagcaggctggcaaaatattttccggacggttccctgctcacagtcactgatttcagcttccatccctccgggatcatacggtggagctttatttttaccggctgcatctttggcagtttcaggaacctgtcctgcagacagatattcccatttaccatattcgttgtataggatttccgcgaatgtttttttgatttataatgcggaaatcccactcccggttcccggaaaaatttccggaaagccccttccagatttaactgtacattcgccagcgcaagagaatctacctctttcagccatggatattcttttttatatccggccggcgtatttttcagcatctttttttcttcctgataataacggatcttatccgcaagcatccggttataaagaaaacgactgcagccgatcgtcttctctatctgggttatctgttctttatttggatagatccttatttttactgcccggtttatctttctcaccctgactctctatatactgatggattgtttcaacaggtgctatatttcaaagatttcttttgttctctctgacatcttatcgtccagcatctttctgctatatttcataaccagaatcaaacaaaaacactgaatgagaattattatctaaactcattatgtacactcacttattgcttatttcgaccgtccaaatttcaagagcatattgttcttttttctattataatatatttattgtatcagaacaagtgttttttcgattttttatgaatttgagcagacatgctcgaatgtgcaattcatcccatcacctataggtgagggaattcttgctacggttgttaaaattcctatcttattcatctttttcctccatatacaacaggccagagtcaaaattttttctgactctggcctgtcaattctcatattataaaaataaaatatgcatcttcccgcggctgtcatttaccacttccgaatctacctggtaaatccttttaatcagctccggagtgagtacttcctgtggagttccatatccttccagcacaccatctttcaatacataaatcttatcgcagtatgccgccgcaatattcaggtcatggatagctgatattacagttacgttaagtttctttaccagttccatcagcatgatctgatgtgtgatatccagatggttagtcggctcatcaaggatcagtgcaggtgtctgctgtgcaagtgctcttgccagaataaccctctgctgctctccacctgacagcgtagaaaatgtgcgatccgcaaatgcatccatctgtaccgttttcagtgcttcttcaacaatccggtaatcttttgcattatcccgttccaatgctttcttatgaggtgcacgtcccatcaacacgacttcccgtacggtaaaatcaaagttgtagtaattgtgctgtgccacaactgccatttttctggcggagctttttacgctcatggaatggagttcttcgccgtccagataaacggcacctgcatctggcttcaggatacggtagatgcattttaataatgtagattttccgcttccgtttggtccgatgatccctaccagttccttatcctttgactctatggaaattcccttcagtatctgtctggcgtgaaatccaacctgaatatcttctgtagtgattttcattacttactacctccaaatccataggatttccgcacaagcagataaataaagcatggagcaccgataatggataccagcacaccgatcggcatctcagaattcttcaggatcacacgacatgccacatcacaccagatcaggaatgatgcaccaagcagtgcacttaatggcagtaatcttctgtggtctgttccaaacaggattctgatcacatgagggatcacaagtcctacaaagccgatcatacccgcacaatatactgcaaacccaatcattacagaagcaacgatcagataaaaagttctcagcctgtgcaaatcagttcccagtgtgatcgatacatcatctcctaacagcatcagattcagattacgatattgcgtccagaaaataattacacagatcaatgtaacaggaagcattacacctactctgctccagcttgcgcctgcaaggcttcccatcgtccacttcattacttctgttgctgcatttttgtcattggtgatatagataacaaaattggaaaaagcagaacataccgcactgacagccattccggcaaggatcagtttggcagaagtagcttttccgcccatgtttgcaatggcaattactgcaaaagaagtgaccattgcaccaataaatgcaggaacaccaactgagtttccaccgagaaatccaccaactccaagcatgatcgccagtgttgcaccaagggatgcaccggatgaaataccaagtacatacggatctgccagtgggttctggacaatcgcctgcataactacgccacagacggaaagagccattccaactgccagagccagcaggactctgggcagccggatcagccacacaacatcgtgaactgcgccttctgcataggcggacaggcttttgatatgaaacaatttatatgcaatgacactgtaaacatctttcagtgacagatctgcatttccaaaagtgattgctgcaagaatggaaaaaatcagaaatgccgcaagcccgataaggactgccacatacatggatgtcctgagcacactgcctttttttgtctgtgaaacctgttctttcactgttatgtcctcaatcagtcaagattcacatccggatataatccttttgcgaaagtttcaataccatcctgtgtacgtgttgcacttgcgtacatttcactgagcatgatcggataaacacgaccgttctttacagcgtcaaggctctgaagtgcttcgtcatccttgataacggcaagctggctttcttttacagtttccggatcatcacctgcatatggcatgtatacaacaaaaatcacatcagggtttgctgcaatgatatcttcttttcctgctgtagaagcatccgggtttgccagagtcgcacccagttgtgttaccatatctccaccaaggctctttgcaccatagtttgtgatatcttctccaagaggttccagaaccattacgcttggtttctcttctacatctgctgttgctgtaagagttttatcgatcactgcctttgcatcatctacgattgcctgtgctttgtcctgtacatcaaaaatctttccaagatttaagatgtctgtaaattcattttccagagttctgtctccgtcagggcgtgtgtttgtgttgtaataagtgttgcagcctttgtcgatccagtctgttacatttccgagatttttatcagaaaacagggagctccaggataagatcatgtctggctccaacatcgttacagtctcaagggatggggtaaattcatcaagataatttgtttttgaaaatgcatctttaagttcatccggaacttcattgtcaagacctgcagtagctaccagacggtcttccaggccaagtgcaagcatggtttcaatgcttccctgatatacagcaagaactttctccggtgccttttcataggttgtttcgatttcatttccatcataatcataggttgtgatggtcagaggatattctgtctttgtaccttctgcgtctgctgtcttatctgcatctgctgaatcctgtgcgtctgcatctgctgccggctgattgtcctctttgattgtctcagagtctgctctctctgctgcaaaagctgccggagctgcggaaactgccatagctgctgccatcataattgccatgattcttgtggataaatacctgtttttcatttgacttcctctcttttcgtatatgttatttacctgttcgtgtaaccgaaaagatgggacttcagaaaaagtaaaatagaagtgataagaataacggatactttttacggaagctccttctttacgctgtcaggcaggtttcctgactcacagatcacagaaaatttccacaaaataaaaactgatacaacatccatgcttcagcagttcatgaatgttgtatcagaaatatttccagatactctctgacagccggattccgccttctcacatatttatgcaatgacatattacaatcccgcttttttctgtatacagtggccgcaaccgttcaggcatttcacctgattccctctcacattaccatacacaaaatctgcatatgataatgttcacttaacagcttattcaattacgctgatacaattttagcacactgcttttataattacaaccatattcgagacacatcagaattctttcttctccataagccggacaccaatccaaaaagaccccatatatacaattactgtaaataatacaactccggccaataccattccccagttcagtccattcagccatgcatcgactgcgtctgctgaaagtcccattgtttttatcagaatataaactacggcaaatataatagcccacatgaccattgcaatataacgtcctttttccgctccaaaatgtattacaagcgggagcgataccgccagcataagaagtgccagtggaatgtctatcaggctgccaatgatagtctcactcagacacccctgaagttctgccacacctttgcagattactcccgttatcgttgcaattccccacgctacagccgtaagccctgctcccagcagatatttttccgccacatactgttttctggtaaccggcaaggtcataagaaacgcaagaccattatcaaactcatcataacttatagtcgtaatggcaaaaattgctgtgacaatcgtaaaatatcctgtagcaaaactgacgctcccgcttcctgccagattcaggatgacttccattacaacaaccaggataaaaaactgtttctgctgtttcatcagttctatatcctttacaaataatcccttcatacctgttcctccatcatcattaccagatcatcaatctttccattctcaattacaacatccgggtaattttccatataaaattgtttctggtttgtcagacacctgtatccataagcttctttccggatcttaataaggtattgctgatccagtttttcgtactcttcttctgcaactttaagaactgcataatctgacagcagtacatctgtatcctcatgaaggataatttttccggcatggatcatataaaaatcgtcacaaagactctccagatctgatgaaatatgtgaactgatcagaatagaactgctttcattttcttccatatattctctcagcatgttcagcacttcatccctggctatcacatccagaccaactgtaggctcatccagaatcagcagttctgccttatggcttaatgctgccagtactttaaactttgctttcataccagtggaaaattctttgattttcttgtctgtgggcagattgaatcttctgcactgctgcaggaatttctctctgtcaaaatccggatatatgcttttcataatattggccacgcccgctgctgtcagatacatactgaagcctgaatctgcaaaaacaactcccagtttctgtttatcctccggcctaagctcttctgcctttttcccaaagacctctatctctccgccatccggatgaatcaagccgagcagagctttaaatgtggtggatttcccggaaccatttcttccaataagtcctgtaatcatcccaggctgtacttccatagaacagtccagcgaaaaacctctgtaatgtttctgcaaatgactgattttcaacatgtcttagtcctccatgatcatttcaaaaagatttctgatttcctcatcgttcagtccacatcttcttcccttcatgaccgcctgctccagatcatgttccacttctttgagctgttcttccctcatcaggtttttatttgtggctgcaacgtaggttccttttccatgaacagtgacggtaaatccctcttcttccagattgtcgtaggctttcttcacagtcagggcactgatcttcagttcctttgacaaactgcgtactgaaggtaatacagtgtccggctgtaactctcctctgataatcgcagacttaatctggtctatgatctgttcataaataggtaccatggatgaattattgattattatatgcatatgtttctcctccatctgcaaacagtatataacagtgcataactgttgtcaactgttttatactgttatactttatattttatcaaacgagtctgcctgcccctgttcactgataacatctcacttcgatttgcagactaaaaacatttctacagacaaaaagaaagatggattcggttataaaattttccaaatctatctttcttcttatcagattcttaatccacattgctacgtatctctacaccgaataactgctctgcagggaactcacttaattcggttaaagaattgtttttaatttgtttttatgtaatgttttttctctgttttttactctgccaaatacgccttcagtttctccatatcagctttcatcactctccgtcccacctcataaatctcctttaaatgggccggatcacgctcaaccggttttgcactgatgtctctgtccgggcggataacatggatcctgccctctttttccagatatgcgattttatccagcatacggttatactgaatatgacgttcatccagaagctttacaagctccggatactccctgaacttcagtctgagcagcggcatcagcttattatgttcttttctgtatcccggatgacgggtacagactaccacatttttctcatacccctgtgaaagcatccagtttacaggtatcggatctgagatgcctccgtccagatacattcttccattcagctttaccggtctggcggccagtggcagggaagctgatgcgcgcatccattccacatccagcctgtctcccattctgcattcctgatagcagggttttcctgtttcaatatctgtacatacaaccgtaaacttcatgggtgatctggcaaatgtctctgtgtcaaaaacatccagcttccagggcacctccccatatgcaaaatctttgctgtaaagatcgccggtagtgatccagcttttcaatcccatatatcgtttatccttgcagaatctggtattataacgaagggttcgtccaatctggcgggacttataattacatccaaaaattgcaccggcggaaacgccaactgtagaatctgcataaatcccctgctccatcagctcatccagaactccggctgtatacagtccccgcatacctccaccttccagaaccattccgaggcctttctttttattgtcttccatagctattctcacttttcactttctttcacatattcatttcggattgcaaatccatgatccataggaccacttccctttcccaggtcaagcattgccgccagtgctcctgaaatatactgtttggaacgttttacagcagtctgcaggtcatatccctttgcaagattggaagcaatggcactgctcaacgtacagcctgttccatgtgtgtttggattatcgatacgctttccttcaaaccagcaatattttccatcatagtaaagcagatcatttgcatcattaatgctgtgtccgcctttgcaaagtactgcacaatgatatgtctcagaaatctttccggcagcctctatcatttcctctgcattggtcactgacatttcaaccagaacctctgcctccggaatattcggagtaagcacatcagccagtggaaacagttcctgcttcaatatctccactgcatcatcactgatcagcttggcaccgcttgttgcaaccataacaggatccacaacaatgttttccgctttatattgtttcagtttctctgctattacatggatcagatccttatctgataccattccgatttttaccgcatccggataaatatcctgaaaaacagaatccagttcctgccccagaaattccggtgttacatttaatattgcctgtacaccggttgtattctgtgcagttaatgcggtaatggcactcatggcatatacaccgtttgtgatcattgtcttaatatctgcctggatcccggcgcctccgctggaatcacttcctgcgatcgtcagtgcagttctcataattgtcttcctctcatttctgctataatacaattttatctactgcctctttcagttcttctgctgcttctttaatgttattctgagcataaatggcactgatcactgccacaccgcaaatccctgttccctttagctgagatatattttctgctgtgatccccccgattgccaccacagggatagataccgcttcacagattgccttcagtgtttcatggggaagttctgccgcatctgcttttgaaccggttgcaaatactgcacccacccccagataatctgcaccacgctcctgtgcaagcaatgcctgctctaccgttcgtgccgaaactcccagaattttgtccggtccaagtttctcacgcacagcacctgcttccatatcactctgccctacatgaacaccatctgcattcatcttcaaagcaatttccacattgtcatttatgatcagaggtaccttataatctctgcataattcctgaagttcagctgcttcctgcaggaaagtttcatcatctgaatttttatctctgagctgcagaaaggttacgcctccatccagactctcctttaccacttccttaaggctccgcccattaagccagtgacgatccgttattgcgtataagcgcattttctctttatcgaatttcatgtttcactcctcttttctactcttatctatagcaatttatcccaaaagttctgctgcaactttctccagctcatctctgatcttaatatgctgcggacatacttcttcccacttaccacatttcacacattcattggcagatttcctgccatgtttgcctgccagccattcttcctggtgaactgtgcagttgcttcttctcttgtcttgcagttgatccatgctgcattctttgtaaaaagagtcatatattttttacatactgataattcccaaaacgtttgcaatagaactcagcaaaataatgatcaggcaaatcggtgcaaagtatttgataaatactctgtacagtttctttctgcggaatggagaagactgttcaatttcttttaccattccatcaataccaacaacacgaagaatcagaatacaggttgcaagtgctgccagcggcatcattactgagtttgttataaaatcgaagaaatcaaggaagttcattccaaagatacgaatgaaatccagaagtccatatcccatggaagatgcggttccaagtacaatcatgatcacgaccatcagaccgcagcatttcttacggctccaatgaagttcgtccatgaatgtggaaacactggtttccatcagggaaactgcacttgtcagagctgcaagtaatacaagtatgaagaatacgattcctgttgcagtaccaaatcccatacttgcaaatacttttggcaatgtgataaacatcagagatggtcctgcctgaagtgtttcaggatttccaccggagaatgaaaataccgccgggatgatcatcagacctgcaaggattgcgatacctgtatcgaaaacctcaacctgtgtggtagatctctcgatatccatatctttacggacataggaaccgtaagtatacaggattcccattgcaatggataaagaataaaacatctgtcccattgctgctactactgtcatccaggagaaatttttcacattcggaatcaggaaatatttcacaccttcaacagcacccggacgtgtgacagaatagattgtaactacgactgccagaactaccagaaccggcatcatgatctttgacattctctctacaccgttctgtacaccaccgagaatgatgatgaatacaagcgccgcaaataccagaaaccagagttccacctgccaggaatcggaaataaagtttccaaaatatccgtcttccgctactgcctggacatttcctttgaaatattccacaagatacttaattacccatccgccaatcgtactgtagtaaggaacgatcagcattggaatcactgcatttaaccatccgccgattttgaaggatttcgtttttccaaaatgctcaaatgcacctaccggactctttctggtcattcgtccaagggctgtttctgacatgatcagtacataaccaaatgacgctgtcagaagaatatagatcagcaggaaaattccgcctccatatttcgctgcaagatatggaaatctccagatatttcccagtcctactgcagaacctgcaactgccagcacatagccaatccttccggaaaagcttcctctgttatggttatgtgcaaaattgttttcttttttcattatacacctcacctcgttacaaaaacctcccataggatttctcccatgggaggtctgctagttttttactgattctatagtatcaaaaagatgcgggaatgtcaaagactaataataattacagacttaattgtaacatagttactgttcacacaccactatcccagtatatatttcaagtatagtctttctgtacgcattgttctatgatataatagttgagctaccacccctagacaggtgcagaaagggggtgtgttgtaaatggatatgatcttatcatttatgctttctatcttggcaagtgtaatcgcctactacatttgcaaatggttggatagaaaatagcagctggtagccagcctgggggaataagccaccctgcccaaacggaataaaaaagcctcagaggtcgcaactctggggcttttgctgtgttataaatgaatttaaccttatcattttgcctactggcattatatcatatgcattttttgtttgcaatatactcaatatactttttcgaatcaagtcaaacttttgtgttactgttcacttcgttcacagtaacgtattggacggtctttggatcaacaccagcatagagaagattggtaatgtaagtgtgccgcagctgatgcggggttacatcaaagtccagcgtatatctgattttgggttgatttttctgggtcatgcccagcgttggggtaaccgtgtatttgatgctctgtacaccatgcccgcctcaccgatagataaggtgtatcctcgtccagaaatacacaatcccattgcagcctgcctgtgataatctagttgattaaagtctgctgacttttcatccctttcaaccccttacaaaaatcggcataatcaagcctattgaccggtataataacaggtctccgctggcgcggctgtcataactccgcagcatcgttcgtatcgtgtgccgcagggttccccccaagtctttggcgggccgtgaggaagtatctttaagcccccatgcagtcatcgcgctaaatctgccacaatccgttttatgaaatcgtagatcgctccgaagcagttctttcatcacctccctgactgctccatcttcgcggtgtttcatattcgctcgtacatgggttatgtacctgttgtgctgtctattcgattggcaatgtactgatgaaggaggaaaacttgtccttcttattaacactgacaaaaaaggcaaaaaacaggcgcatcaaatgaaattttatcaaaaatattttacaagcagctttaatccacggcggatactgtctcggacacggcttgaatctacaccttctacttcggtaatttcatttaccgtcattcccagatagtatcgggcataaatccgctttgcctgtttctccggcagcctcatcacagcagcatagacctgctcctgaagctgtttttcctccagaagcatttccggcatttgcggcttcaacagcactgcattttcaatgccattctcgcaatccagagaatactgtgctttataacgatacacctttcgctcatacgcagtctccgcacgttcagctgctcgaatagtctccattacttcctctgtcacatctacaaaaaagtctgttgtataaacatcaggataaagttcccgaaggttaattttcttcattatgtacctcaatttcgattcacgggtgattgacaagtgaatcgaatggaggcggggaacggcaccggcaaacaaccggatcatctccgaaaaaacggcaacaaaaaacgccagatttccgcgatggaaaactggcgcgccaaaaacagccactattatactgaattacatggaacaataatgccgatgcaatgttgtacttgcccggaggaggagcaatgctttttttaactgatgtaaatcatgcgaactttgaaaaagcaaacaggacacggtaaattaacctccaatcggctaccgtgtccctgcaagtcgtcattggtttgtgtaaacgcaaagaaaccgcgatcaggcagcatccaataaatttcccaactctacgcataactgtttcctcactgaacgaaagtaaggaacatggcaagcgcaacaattcccaccatcagcagcagacaaaaaacgctgattgcagttgatacaatattgattatgctgcggctttccctgctccgcacacataccaccgaaaggatcagacccagcaggacaaaaacgatattggctccggcccaagcggttcggactccatccgacagcgaaaggtgcagaagcgatggggcaagagccgccagcggtaggatgctcacaatgagcgcagcgatactaactgattgaaattttttcttttccatagttttacctcatttcttttttcccaaattgggtgacagccagcgcgaaaaacaggccaaacactacaatcgcgcacggcaggaacggaaacaccgaaaaagcggcgtcggaagtttctgctgtaaagtcatgaagagagcaggaaacgagataaccgctgtaacagtacgggtaggcgatccacagcggcgtattcgcaaccaatacaccgggaatcacaagcagcagatttaatcccacagaaagaagcggcttttcaaacagcacagtgatggcccacatagccgcaatgcacggcagcatagtcagaaacagccccaagcaccatttcagaagatatagaatcggcagggtttctgttactcccattgtctgtgtcgcaatcaacccagcgattacaaatacgacaagaaacaccaccatctccataaacagataaaaggtaagcacacagaatttggcaatggataatgcgcagcggctgaccggcagcgccagcattttcagaatcccgttatttcctgtttctcgtcctgcgatcatcacgcaaaccacgatcatgctgaatggaagcagatagtaggcgtaaacaagcgcactttgaataaacatggcagcccacgcattggtgtattccggtgtaaagtagttgctcaaatacgcaaccccggaaaccaccaccaataaaggtgcaatgaaaatcaggggtacaattttggagcgttttactttcataaactcgattttgagtaaatccaaaaaactcatttcttattatccctccttactcgtagcgtctgtacttcgccagccacaagcccacagcaaggaacaacagtgtttccaccaaagcgacaagggcaaccgtcgaatcaggctgggcgctcatggctactgctggtttcagaataatcacaaaaggatgcaccagcaaaagcgtcagccccgaatttgcaagggccataccactcagaaaaccggcaacaccaattccaatcggcacccacatattttcaaagcgcgaggaaatcagcagcataaacgacagtaccggcatggatgtgagaaaagagtatccggcaaagcgtaccagcgtacccatctcaaacgctccgtccggcaagtccgtcattccgatctgtgcaagtgccaggttttgcagcacgatagcaaccaaaaacatgaccgtcagaatcagaaatttgcacagatacatggccgggacgctgatgggaagcatatacatcttctttacggcacttcccttaaattccatgttgtagatcatgcaggtagcaaccacgataccgaacagattcagcaccataatcatgccgtagagctgggtcaacaagacatccatcggggccagcggcaaattcagaagtgtgtctttccgcacaatgaaattgacaaatgcgtaggcggctcccaagacaccaacggccagcagcacgggaatcacgccggttcgctttcctttccgaagttcgattgccagcgttttcataattttgccctctgctttctgtccatgttatctttctcaaccatagaaagaaacacatcttccagattgtccgcagcgaagccggattgcagggcgtattgacgcagatcattcatgcttccctcaaacagcagccgcccgtggttgagaatcccaatgtcatctgcaatcaattcgatttcagacagcatatgggacgagatcagcaccgtgcagtcgtaaaggctgggcaaggattttaccagattgcggatttcgtggataccagacgggtcaagaccgtttgtgggttcgtccagaatcagaatcggcggacgccccaagagcgccccggcaaggcccaagcgttgcttcattcccagcgaatactgttttgccagccggtcgccaaactcggtcagccctaccagttccagagcatcttccacatcagctttcggcagtcccaaaatgcggcggataatgtcaagattttcccgcccggtgagatttgcgtagaaagatggctcttcgatgaaagagccgatctctttgagaatggcaatccgatcctgcggaaactgtttcccatcaatagtaaaactgccttttgtgggagctgtcaaccccaacagcattttcatggtagtggatttgcctgccccgttcgggccaagaaaaccataaatgctgcccttgcgaatatgaagcgaaacatgattgaccgaagtgaagttcttatatttcttggtcaaatgttccgttgtaatgatatagtccatagaaacatctcctttcgatgcttctatggtacaacttcaacctgacatctacattctcccgtccttacttttaccttactttttgaggatgccctccgcagacttgaaatcctatgttataatactttcgggaggtgatgctatggacaactcttttctgcatcggaagaagctcttgcttgtagacgatgagccagatttgctgaaaatggtatccgatattttaagcgatgctggttttgaaacggtacttactgccgcaacggtaaaagaggctataataacggcagaaaaagaaaaacccgacttgatggttttggatgtcatgctgccagatggggacggcttttccctgatgaagcagctccgcacttttacaaatgtgccaatcatctttctgaccgcaaaagacgaagcagcagacaagttggccggtcttggccttggagcagacgattatatttcaaagccgtttatgccgcaggagctattactgcgtgtctatgcggttttgcgccgaacttataaagaggacagcccgcgggttttcctggatggatgtacgattgattttagccgggcagaggtcaacaagggcggcgagattatccccctgaccgcaaaagagcataccctgctggaaacgctggcccgcaacgagggaaagatcgttacggttgacgctctttgtgaagcattatggggcgacaatcctttcggctatgaaaatagcctgaatgcccatgtacggcggattcgggaaaaaattgaagccgatccctcaaagcccgtttccctgattacgatcaaggggctgggttataaactgattacaaggaagtgacgccatgaaatcttttggaacctatatttcaaagcacttggcgtctttcgctgcatttcttttgatcctggtaattgtcaatgtcgttctgtatggcgtgactttctatcacacagtttcagaggattacggagaagcgtccccgcgcgccatgcttgagctgacctctactgcggctaccacagaaggtttgcccgattacgcagagcagaaattgcgccagtacaatatctgggccatgtatctaacgtcaacgggcgaatgcttctggcggctcgatgtgccacaagaagtgccgcaacattacagcattcaagaggtagctttattttccaaaggctatctggaggattatcctgtttttgtctggagtacagaggatggattgttagttctagggtatccaaagaatagctatatgaagctcaccagcaactactattccatggagactattcagaaaattcccctctatgtgataggaatgttgggcatggatgtgctgtgcctgttttgggcctactatttttcaaaacgcaggatcatccagaacacggaaccgattgtagatgccattgaaacattggccgatggcaaacccgtttctctccatattgatagagagttatccgaaattgcgaacagcgtaaataaagcctctctgatattaagcaggcaaaacgaagccagagccaactggatcagcggggtctctcatgacatccgaactccgctttctatgattatgggctatgcagaccggatcgccgcagacaaaacagccagtgagggggtaaaagagcaggctgtgatcgtgcaaaagcaaagcgccaaaatcaaagaactcgtgcaggatttgaatttagtatcgcagttggaatatgagatgcagccgcttcataaagagatggttcgcttatccaaactactgcgatcctatgtagcagacttgttgaatacaggaatttccgatagctacaacatcggaattaagatcactcctgacgccgaaaatgctgtgttggaatgtgatgccagattgatttcgcgagccgtaaacaaccttgtccagaacagcatgaaacataacccacagggctgtgaagtctgcatttctcttacagcatcgcaaaaccatcttatcttggcggttacggataacggaatgggtctgcctgctgaaaagctgcaagagctggaagaaaaaccgcattatatggaaagcacagatgaacggcttgatttaagacatgggcttggattgctgattgtccaacaagtcgccatagctcataacggcaatttcaaacttactaatgttttcccgaaagggtgtgaagctgctttaatattcccgtatattggataaacaggcaagtacaaatctataagaaaacgccagatttccgtgagggaaaactggcgcgccaagaacagccattattatactgaattacatgaaacgataatgccgatgcaatgttatacttgcccggaggaggagcaatgctttttttaactgatgtagatcatgtgggctttgaaaaagcaaacgagacacggcaaaataacctccaatcggctaccgtgtccctgcaagtcgtcataggtttgtgtaggcgcaaagaaacggcggctctgaaaatcaaagccgccgtttcaaatgggcatgaaaatatgtcagctctacgacggctttttttcttttgccgtcgtccggcagagtattattcaatatttaattcaatgtttccagtgaaattctcacattcaatgccgatatagtttccaccttcagggagtgtaattgtatcactatatgttccggttgtttcaaacaaagtgactgcttcatcagctccagaaatccaaaatacttttgcagttccctccgtaacctccagcgcgcagtcaatagacagatccttaccagcttcacgctttatggaagttcctccgaacaaatactctgtatctgaaaaatcctcatagttggctgtatagtttcctgtataatcatcaattcctttttctttcgtaccttgtaaggatgaatttccggtaagcgctatggaaccagcagactgaacaatattgttatactgatcgagaaattcgtcttttgtacaacctgaaagcacagaagcacccaatagtatcaggtataatgataaaactattttcttcacagctatcaccttcctttcctgcgtacagcacgctttccttttcccttggcatttgcctgtttacgggatttcatttcttttttgttactggacatcagtaacaacagcaccgcccagagaaccatgatgccaaccccaatgaccgccaacaaaggggttgaggatatggttgttccggcatattcactcatgtcaaatcccactaaaatcagcgcagcagagaacggatagatgctggcaaggataccacttttgaaaaacaacatgctgtatccaaggaagaacgccagaatggaaccgcccagatatgcccctcggatctgcccaaaaatcaggatcagcggcatacagaccaaataggtcgtcagagccgctaacacgatctgcgtacctccatgaaaaaacacttccgctgtcagtcccgataatccaaccgtcaatccagtaatcaaggtaatgccaacgctgtatattcccagcagaactgcaagcataccgactaaaagtaacttagctcccaacattttcggcatagaaacaggaattgtcatgatgtttttcagtgtatcatgagtggattctctgtctataagccatcctccgatcattaccagtgaaattggaaggaatatctgagtgtttccccaaacaacattttcaaatagtgcagaaaaatcatagtttggatttcggtactccgcctccataatcaactggcttccatattgcaccaaaggacaaagtgcaagcgctaccaaccctaccaaaaggatttggcaccggcgcagtttcaataattccgattttaataagttccacatagtcacacccccttagatttcctgtcgccggtaaacaaatgcaatcagcgcaagaaatacaatggcttccacaataatcacaccgaatacctgaacaccattcagaaaatacggactgacccgttccaacaaatctgctaactccgcactggtctggctttggtcataaaattggaatgtccagcggaaggccagcggccccggaaacagggttcctatgttcaaaccaaaaggctgtgtgagaaacatatcgttcgtggaaaggatagaattcgcaatcgtatagaaaaaggtaatcacgacagacacgatatagtttttattaagaagaacaacgagcagaatacagggaagtgcgcccacccacataatcagcccttcttcaattccaacgccaaacaagttccaaaacccaaccggttcccaaccctgaaacaacaaaaccgcaagatttaccaatcctccaactgccataaagccaacggcaaacaacagtaaaaccagcatcttggacagcaccagcttggttctatttaccggtacggtaacaaggtttttcagtgtgtcattatcaaattcctcaaacaacagattcgaagccagtatcacaagaagcggcatcaaaagcaaatatgcactaagctggaataggctggacatcactccatttacagcatccacatcagtgtttacatctgccagaaagaaagcataagccaatggcatgaaaacagaaagcagtagggaaataaataccaatggcttccgttttaatttcaaaaattcgcatttgattagtttaagcaattccttctccccctgtcacacgcttgaagtaatcttcaagactttcttcacaagtatgcacctccgatacctccaatccgttttctacaaaggcagttacaattttccccacaggcagatccaggttgtgcagacgcagattgtggtcgtcctgtatggagaaatggttttcatggaaattgcgttccaaaattcttgccgcctgtgcagtatcagagagcgtaaaacggatatgcttattgcttttttgctccagctcagcaaggctttcttcttccagcaacgcgccgtggtcgataattccaatatcgtcagccagcaaagaaatctccgaaagaatgtgactggaaatcaaaatagtttttcctcttgcgtcgcaaagctcccgaataaaggagcgtacttctgcaataccgatgggatcgaggccgttgatcggctcatccaaaatcaaaagctccggatcgtgcataacggcaagggcgatggcaagccgctgcttcataccaagagaatactgtgaaaagagctttttatctttgtagggcagtcctaccagattcagagcatctttgatagcatgattgtttggtacgccccgcagagtagcaaagatacgcaggttctctgtgccggtcagattgggataaaaaccgggggactcaatcaggcttccgatacggggcaacagcttcttttcattcccttgcaaagactttccccagattttgacctccccggaagtcggcttcgttaagcccaacagcattttcatggtagtggtttttccggctccgtttctacccaacagaccataaattctcccacgcttgacatggatatttaagtcagccacactcttttgtgagccgtattgctttgtcagattttttgtttcaatgatataatttgtatccatattcaaaacctcctgttctgtaaggtattctatcacgccaaccttgcattaaccttgccgcaaccttgcattaaccttgccgcaaccttgcattaaccttgcaattaaggaatgaattgcaatgcaaatcctattccgctacttctcaatccgtttagggattgagaaggttcccatgccattttctaaaagacttctgaaaataagtaaggctcccgccataaagacgggaacccgcttaaatttccaaaggaaaaagcaaagtaaattccgttccttttcccggtacactttcaactgttatacttccccccatcttttctacaagctgatggacaatagaaagaccaagaccgcttcctttttcagaccgtcctttgtcacacttatagagccgttcaaaaatgtgtttcaaatcttccttctcaattcccactccattatccgccagcagcagctccatgttattttccttcttcgatagggaaattttaattttgtctgcatggctatgagcgattacattttgaataaggttattgatgatcctcatatagctatccatatctaatcttacccggacaggctgttcaggaatatcaatgtcataattaacctgtttatcctcaaaaatcggtatccagtcaatgaggatatttcttgtcagctctgcggcctcaacactctggatctccaaagcaaactcgtttgaatttaacttgaaccagtcaaagagtacatcaatatattctttcagatcatgggctttccggcgggcggtttcaatataatcatcccggtcttttcctgtgaccagtcctttgtgtgcagcgtcaagatacccaatcagagtagtaaggggcgttcgcacatcgtgggaaaggctcgtcataagctggcggttggtttcttctgtctgccgtacaatcgaaagtctgctttcataggacacaacgatctcattgatttcataggcaagaggtgctgtcagttcatttgttgcagatagaatacgccggttgccatttccgtttttcacatcaaccagtgcatcggtcatttctgcgatttgtttttttacacgccgaacgagaacgatggaagtcaatacagccacaacagcaatcacaatggacaagaatacgataatttccatgctgactacacctccttattaaaccggtagccaatccctttgaccgtttgtatatactttgggcttgaaggattgacttctaattttttacgaagtcggctgataatcgccataatattactgtcatcatagaaatattcttcgccccatacttcctcataaatctgctgtttggtcaaaattttcccttgatgttttgcacagtacaggagcaaatcaaattcctttgggggcagttcaaaagtgccgtttgatgtagtaacagaacgattttcaaggtcaatctgcaatccgtcaaaatttagcttttgtatggctccagcttgctgattaaagcgagtgtagcggcgaataagagacgcaatacgggcaatcagttcatccatatcaaacggttttgtaagataatcgtccgctccggcccgtaagccccgtactttagaaatgctgtcatttttagatgtgaacatcaaaatcggcagactgttctctttgcggatttcttccagcgtttcaaagccatccataccaggcatcatcacatccagcaccacaagctgatactcctgctctcttaatttttgtaagccctcttttccggtattacaaaaatcagcttctatgttttctgcttgtacgctacgtttaatcaaagcgcacagttctctgtcatcatctataatcaggattttattcatggtgcaaccccttcccttgttttgtccttccgtcaatcggcttttctgcgttctttgggatcagccaaacaccagccatctttacagcgccggggatacgcccagcagcgcaataataatttactctacgaggtgtcacgccccatttttcggcggcctcttttagtgtcatataatccattctgcacctccacagagtacattatagttctttgcctcgaacaatacaagtttatctgttccaacgcaagcgtttctttgttgtatagttcttcaggtgtttttgcgtagatagctacgagcttaccattcgcgtctttgattctggtcctataatataggacacctcttttcataactgtgccatatgtactgatgaaggaggaaaacttgtccttcttattaacactgacaaaaaaggcaaaaaacaggcgcatcaaatgaaattttatcaaaaatattttacaagctgctttaatccacggcggatactgtctcggacacggcttgggtctacaccttctacttcggcaatttcatttaccttcattcccagatagtatcgggcataaattcgctttgcctgtttctctggcagtttcatcacagcggcatagacctactcctgaaactgtttttcctccagaagcatctccggtgtttgcggcttcaacagcaccgcattttcaatgccattctcgcaatccagagaatactgtgctttataacgatacatctttcgctcatacgcagcctccgcacgttcagctgcccgaatagtctccattacttcctctgtcacatctacaaaaaagtctgttgtataaacatcaggataaagttcccgaaggttaattttcttcattatgtacctccatttcgattcacgggtgattgacgggtgaatcgaatggaggcggagaccgacaccggcagacaaccgggtcatctccgaaaaaatggcaacaaaaaacgccagatttccatgagggaaaactggcgcgccaagaacagccattattatactgaatcacatggaacgataatgccgatgcaatgttatacttgcccggaggaggagcaatgctttttttaactgatgtagatcatgtgagctttgaaaaagtaaaaggggcacggcaaaataacctccaatcggctaccgtgtccctgcaagtcgtcataggtttgtacaaacgcaaagaaacggcggctctgaaatcaaagccgccgtttcataaggcgcgtgaaaatatgtctgctgtacgacggctttttttcttttgccgtcgtccggcagattaacatatgaaactataattcattgatggttgcagtaattggcatattgcgaattctctttgcaggagcataaacagacacaatagcagatatgaagataaaggcaacgacaattccaaaccacaggataggaaatctccactcaattccaaaataatgtgtaattagacgattatataaaaatcgactaagcgggagtccaatgccacatccaactatcaaaccagaaattgcataggtgtacgcttccgcagaaatcattcgtttaagctgcctattatccataccaacagctcgcattgcaccatactgcttaattcgtgcagatacactcattgagatactattgacgatattaaacagcgaaataactccgataatagctaagaagccataacaaacaattcgtgcagcccaatatgtagcattattttgtttattgccttcacgctgatctgtaatgataatatcatcgttttcaagacttctaatttctgctattgtttcttcagtagcgtttgaatctaactgaattccaataagcccatactttgtatcgcccatgatacggtcaaatgtttcctgtgagcaaataataatcaaatcatctccgaataacccttgtgatagagcgcaagtaatctcaacttcttcgcctgcaaactggatggtatcaccgatgtgcaaggaattgtttctattaaatacggttgccactttgttactgttcccgtaaactgtatctaatgatccctgagcaatactaccttttgagtaatctagaagtgtatcatcataagaaacaatattgatatggtctattcctgctcttgaagatgttgcaggaatgttttctacatagctacttccataagcatttgcaaccccatctatttttttgatttcatcgaccaggctgcgctcaatatccattttatttgcataactggataatgctatatcggctgatgtgacactcaacgatggaacaagttgctttgcaaaatctaaaattacagaaaaagaaaaaaccagcataatagtcagtgcaaaggaagccgtcatcagaaaccagtttttctttttttcaaccgcatgatgtatgccaagtgaattatcaatttttcctaagctaaacttgatagcgtgtttaacagaagatttattatctacattgccagaaaccgcagatatgggtgaaactttagcagcccgctttgctggggattgtgctgctaaaaatactgttaccactccaacaactacaccactgataagtccaacagggctgatctgaaagactggcgttgtagaaaattctccaccaattccataatgaagtgtggcacaaataatccaactaattattgttccaaaaaccactccaataggtaccgcggttttacaccagttcaatgcctccaaacggacaaagcggataatttgttgacgacttgcaccaatgcaacgcaacattccaaaaaattgagttcgttgcgcaatgatgctattcatactgccagaaatcatcaatattcctgccaacaacactaaaacaaatagaattgctgccaatccgtacatactctgcatcgctgtattgttgctttgcccagccatgcccataacgccggtattttcagaaatactcccatcggataattggtactgtgtctgtagttctgttattgcatttgccgctttcgctgcactttcaaactgcacataataagtcaactcattgtttgttactccgttttgtgccataacagaagtaaatgcactttgtgtcagataagagcctatcaaataagtctgattgttataatagctttcatcatctgtgccaaagccagagattgtaaatgtccgatctccagcaggggtatgtaaggttacactatccccaagctgtactcctaaagcagttacagaattaggtgtaagcataacttcctcatcatttgccggaaatgttccttctacaattccatttgaaatctgagtaatatagacttcatcggtgccatacaaaacagttcgtttttcgttgactcggtacggttgttctccttcaaaattaaattgagaagctacaccaactgctgtaacatctgaacgattactgatttcatccgcattgttctgtgaaatattttttattgcaatgtgccagtttccatggttacttatcataaaatcgctttctgttcgtatcatcatgtcagcaacactgaaaatagctgtgacaagaaacaccgaaatgataatacacaagacagtcatacgattttgccgcttgcgcacctttgcggagatgggaatgagactaagatagcttttcattcacggcacctcccaaaatcagtcaaagtaccatccgatacctgtaatacccggtctgccgtttgcgcaatactgcggttgtgggtaatcataatgatggtctgctcgtattttttcgatgtttctttgagcaatgctatgacctcactactgttttgtgagtccaaatttcctgttggctcgtctgccagaatcagagaaggacgggtaatcaatgcgcggccaatcgccactctctgctgttgaccgccggaaagctgactgggtaaatgattacgacgatctttcaaattcaaaaccgtcagcagttcctccaaatatctcttatccggcttttgataatccaacaacagcggaaaaataatattttgttccaccgtcaactccgggataaggttaaacgcctgaaagataaagccgatattcctccggcggaaaacggtcagctttcgatcgttcatggcaaaaatgtccttgccgtcaatcagaaccttgccagatgttggcgtgtccaaagcaccgatcatattcagcagtgtacttttaccagagccggattccccgacgattgccacatactcgccctttggaacagaaaagctgacatcctttaatgccttgacagcggtttctccgttgccataggtcttactgatatttttgacttctaataagttcatagtgtaaacacctctttctgaatgattttgcgatataggcaggctgtctttgtttgtcctgcctatgtgtgagagaatagcacctgaatcttactgtaagcctacagccagcctacaattttgtaggaatcagaaaattcattgtgaaagttgtcccgatacctaattcgctgtcaacctcaatggtgccattatgtgcttcaacgattgcctttgccaaaggtaatcccagtccaatcccttgcttgtccttagaaaaacgactgcgataaaaccgcttgaagatgtgatgtatatcttctgggtggatgccgcatccattatccgttatcacaatttggacaccagacggcaactccttccacgcaacatgaattgttgcaccactttctgtatggtcaaacgcatttttcacaatattgtcgattgcctcattcaaccaatcacgatcacaaaaaagagaaagatgatccgagccagacagaatgatttctttcttttcctgtctggctctatatgcaaaatgcagttcaatatcccgcatcatatctgcaacattttctgcgttcttttccaagacaatggctccggcatccaatcttgtaatcttgagcagactttgcaccagtgtttcgatacggtcaagttcctgctcagacaaacccgcaaattctttcacggaggacacttctatatcctcgtcttgaaggagtccgttataaatattgagtgctgccagcggtgttttcagttggtgtgaaatatcggagattgtatttttcaaaaactctttctctcgtaactcgttatctgcatgggcatttaacactgccgctaaagaattgatggaatgaaacagtcggtacaattcgccctcattgtcacattcaatacgggcattgcgatcaccatcaagatacgcattgatttgtaatatcgcctgctccatgatctgattttgccgattaaaatatacaaagcagactgcccatacagcaccaccagccaatagaaaaaggattagcaataacagagaaagccggcgatatgatagccatagaaaaacctcggctaagagaaatgtaaccccaaaaaccagtgaaagcgaatgaaatagatttttgatttctttatttgccagtatcttcattctgcacctcacccgataatattccatttatatcccatacctcgaacagtcaggagcatttgtggttcgcttggattatcctcgatcttcatacgaagccgacgcatatagaccgtaagggtactactgtcgatataattcccgtcgcaatcccatagcttatctaaaatttgtccctttgtcagcaccatgcttgggtttctcataaacaggcacagtagcttgtattccgcggcagtcaaatccaacagctccccatttttgaaaacctgtccttgcagcaaaagaaccttgatgccattcgactgcaattctgtgtctgctgcttgaaaagaatttgcacgtcgaagtaaggcgttaatccttgaaacgagaacccccagtttgaacggttttgtgatatagtcatcacctccaatatccagccccataataatacttgtttcctcatccgaagccgtcagaaaaataattggcacctttgatgtaagtcgaactcttttgcaaaattcaaagccagacccatctggcagagatacgtccaacaccaacaaatcatattttccgtctgtccacaattcctccgcttctttgagcgttctggcgatatttaattcaaatccctgctttttgaaagcaaaagaaagcccgttaatcaggcttagatcatcttcaagaagtaatatattactcatacttttttacctttccttgttttgttcgaccatcaatcggcttttccgcatcctttggaattagccagatagttgccatctttacagctccagatatgcgcccggcggcacaatagtaatttactctacgaggtgtcacgccccatttttcggcggcctcttttagtgtcatataatccattctgcacctccacagcgtacattatagttctttgtctcgaacaatacaagtttatcaccaatcgcagctttatataatcggcataatcgtacagcttgtcagacataataaggtcattccatcacataaaccggaacgatacaatattattaaggtgaacgattatgccgattgatgatttaactgctttagggcaaaaatgcgggaaacccgaaagaataaagaactgacacaacaggaactttctgatctgagccatgtttctgtaaagcaaatcgccaatatcgaaaaagggaaaatgaatccttcctatttgattttgagagcattggcaaaggtcctgcacatctctttagatacacttataaatccagatgtttctctggaggatgaaggtgtcaatcagatgaaaatgctttattccagctgtcctccagaaatgcgtgacaccctgctgcatcacacccaggaaacggtgaaagaactgacagagttgtccgagatatttgaaatgaattgagccagcgagtgaaatttaacgattctctcactggttcttttcaatttcggagaaaagaggcaagcaatgcctgtgttaatacacacaggcccgcagagaagaaaatccctccgtgattttcctctccgcttgcttgttgagggcagcgcccccaagcccctttgaacacagaatttcattctgtggctgcgcggtatccgttccatgcgacgaaaccctgtgattgctgacctgttccaccgcatgaagtacatggaacgccgtggaagtggcctacgcaaaatcgtcagtgaaaccgaaaagctacctggatatacagcggcatataagcccgaattttcctcaacagcgacagatttcagagttattttgaaaaatgtaaactacaacttagagggtgatacccaccaagttacccaccaagttatccaccaagatattgaactatcaacgatgtccaaacagattttggctttttgcacaacaccaaaatccaagaaagagcttgcagtattttgcggcttcaaagatttaagaaacttcactttgaagcatatcaatccgcttttagaatccgtgcaattagaaatgactattcccgataaacctaaaagtcgcaatcaaaaatatattacagttcgttccgaataaacagagaagcagggcattgggtctcatctcccattgtcctgcttcttttcattccaaattatattcacatcatttacccatacgcccaatcctggatcgcaaatttcaaactctgcaccttgcccaacagccagatcgcagccagcggcaatcccatcgggctaatcaaaaatgccataacctcctatatttaaccactaaaaattgggtgaaaactgctctcgtttggtcaaatcaagtcaaactatatcagcccgtttaggtataagaaaaccccggaaaaccttgattttccggggtttttgaaccattttgatatagtctgagcagtcgattatcgcttgctgaactgcggagcgcgacgagctgctttgagaccgtacttcttacgttctttcatacgtgggtcacgagttaagaatccagcagctttcagaactggtctgtagtcgttgtctgcctgaagaagggctcttgcaacaccatgtctgatggcaccagcctgtcctgtgtatccaccgccatgaacgttaactaatacgtcaaatttgccttctgtttctgttgcagctaaaggctgacgaacgataactttcagtgtatctaatccaaaatattcatcgatatctcttttattgattgtgatcttaccggttccaggtacaagataaactcttgcgattgatttttttcttcttcctgttccgtagaattttgcgctagccaatgttttctacctcctaattaaaatgttaaagcttctggtttctgagcttcatgtttgtgttccggtcctgcatatacgaaaagttttgtgtacatgcttcttcctaaaggtccttttggaagcatacctttaactgcgagctcgataactctctcaggtttctttgctaacatttcttttaatgtggtttctctcattccacctacataatcggagtgattgtagtagattttctgctctaatttcttacctgtaactttgatcttgtcagcgtttacgatgattacataatcacctgtgtctacgtgtggtgtaaactgtggtttattttttcctcttaaaacgcttgctactccggatgccagacggccaagagtacatccatcagcgtcaactacataccattttctttcgattttatctggattagccatataagtctgcatggttttacctcctgttatttatcaacgatagtttaattaaccgcggaatttcccgcgaatataagttattggaaacgccggtgctaaaaatgcggaaatgtccgaaaccgctgataaatactttcgcctgggctatttggcttaagcatctcgcactacgtcacatttggttattatattataagggttctgttctgtcaataggttttgtgtcgttttttcaacttttttcgttactcccccgttttttgtttttcatcaaaaaaactgttgatcagttatcccaccggcaattatcgaaacggatgattttctcctcctgactatcaatcaaaaaattcaatccccatcagtgtcagtccctgtgccggagcagttgggcctgccatttcgcggttgcaggcttccagaattgtctttactctctcaggcggatactgtccgtttcctacttcgatcagagttccggagatgattcgtaccatgttgtagaggaatcctgttcctgttacacgtatggttacgatatctccgtcacgccatacatcaattcctgtcactgtacggatagttgtttttacctgcgcttttgcaccgcagaaagaagcaaaatcatgctgtccgatcaggtatgaggttgctgctttcatcttatctacatccagtttgtagtggtagaaataggtgtataagcgctctgtcggaaccgggaatttgcgattcaggatgcggtattcgtatgttttctcgctgtcgcaataacggggatggaaatccggttctacttcttcagagagctgaatgcggatatcttccggaagatgctggttcagtgcataggaaatcttttccccgggaatgcgtgtgttggtgtcaaatactgccacgtttcccatggcatgaacccctgcgtctgtacggcttgcaccgatcgtttctatcttctcgccaagaagctcggacaatgtatcatttaataccccctgtacagtaatcccgtttggctgtgtctgccagccgcaatagtttgtaccgtcatatgcaactacaagaccaattcttttcatctgttttcctccataaaaattgaaaacttttgttataacaaaataaacaatatgctgtaatcctttcctaccggattacagcatataaaatatctttataaattatatcagtactttctcagattcccacaattctgaaaacaatggcgattcccagataagcccacatcaccacataggaaatgtagtctctggactcataacgcaatggcttcatctgggttctgttatcccctccatgatagcaccttgcttccatggccatggccagatcatttgctcttctgaacgcagaaataaacagcggaaccagaagcggaatcatattttttgccttctgaattatatttccggtttcaaaatctgcgccacgtgcaatctgtgctttcatgatcttatcggtttcctccataaggattgggataaaacgcagcgcaatagacatcatcatggcaatctcgtggattggcacatgaagtttatttaacggcctgagaagtcgttccagaccatctgtaagctgattgggtgtggtagtcagcgtcataagagaagaaccgatcaccagatacgtcaggcggatggccattcttccggccagcttcagcccctcctctgtcacatgcaggattccccactgccagagaacctttccgggtgtcagaaatatattaaataccactgtgatcataagaagcatcacgattgccttcagtcccttgaacataaatttcacaggaactttggaaagaatgatcatcgctgccagaaatatagttgccactgcatatcccggaaatgtatggaatacaaagacagagatgatgaacaccagcgtacccaccagctttgctctcggatccattttgtgcagaacggaatctgcaggataatactgtcctattgtaatgtctcggatcatacttcctgccctccctcattctcttcttgttctgcagactttttatccattgtttccttctgaatgcttaaatcttcatcaggcgcatctgaatgagactctttcgtcccatcctcagtcagatcagcttccatctcactaattaaggtttctgctttggcattttcttttttcgactgactgtctgaaacagattgtttgtcaccggacaatttcccgggattacattttcttaaaactgcaaggatattctcttttgcctcatccaccgttgtagcagttacatctacatccaggcctttttccttcaacgcatgcatgatataagtaatctgcggtgctgcaagtcccatggcctccagctctctgtaatgagcaaatactgctttgggagcatcgtcatatgcgatttctccgtcattgactacgatcagtctctccgcgtattttgcaatatcctccatgctgtgggatacaaggataatggtaatccctcttactttatgaagctctgcgatctggtcaaggatatcatctcgtcctttcggatccagacctgcagttggctcatccagaataagaattttcggattcattgccagtacaccggcaatagcaactcttttcttctgtccgccggaaagctcaaaaggggatttactaaaatttttctccttgaaacctacgtgctgcagtgctttctttgcttctacttctgcctcttccctggataatccctgattcatgggaccaaagcatacatcagaaagcacatcattctcaaagagctgatgctccggatactgaaatacaagaccaacctcgcttcgcagggcacgacgatcatatttctctccccagatatcctctccattataagtgatcgtaccggaagttggacggatcagcgcattgaaatgctggatcagtgtagatttcccacttcctgtatgtccgataattccgataaactgtccgtccggaatagaaagattgatatctttcagcgcatggatctcataggcagttcccggactgtaggtataagttacattttttaattctattgacataaggcattcaccagctcctctgtagtcagtattccctccggaacatccactccggctttatgaagttcgtgtgccagaagtgttacctgcggcacatccagtctgtattctttcagagtttccacctgtgagaaaatctctctgggtgttccctgcatcaccacttctccgttgtccataacatataccttgtccgcatgaacaacttcttccatatagtgggtgatcagaatgactgtcactccttcccgtctgttaaggtcactgactgcctcaagaacttcctttcgtccattcggatccagcattgcagttggctcatccaaaatgatgcatttcggacgcattgccatgacaccggcaattgcaactctctgcttctgtccgccggaaagtttattcggagaatgataacgataggatgtcattcctgtttttttcaggctctcatctacacgctcccagattttctctgtgggcacacccatattctccggtccgaaccctacgtcttcttctactacagttcctatgatctgattgtcaggattctgaaaaaccatgcccgctttctgtcggactttccataattccggctctttagacgtgtcaatcccatctacccacaaagttccttccgtcggaagcaacagcgcattcaggtgctttgcaagagtagattttccggaaccattatgtcccagaacagccacgaattgtccggcttcaatgtccaggtttacatcattgacagcacgctgcgtatcctgcacgttaccatcttcatcatacttgagatagtcaaatcccagcttgaatgccttgataattcccataatattttttgtcctcgtattttgtctgtctgctgcttattttcacaggaaaagaatcccgtcagtaaacagcgaatatttattttttcaggcttcttcagtagctgccagtccggtcaactcgtcaatcagagcccagatctcatctcttccctgcttcgtctcagcagagaaaggaataataatgccatctttgctcagcttcagcccttctttgattgctttgatatttttctgaacctggcttcgtttgagcttgtcaagcttcgttgcaataatgatcggctcatagccattgttcagaatccagtcatacatcatcttgtcatttgcagacggatcatgacggatatcaataagaaggaaaaccgccttcaggtttttggatgtatgaagatatctttcgatcatcttgccccatttttccttctcagactgtgaaacctttgcgtatccgtaaccagggaggtctaccagatacatggcttcattgatattataaaagttaatggtctgtgtttttcccggctgtgcacttgttctggcaagagatttccggttcatcagcccgttgatcagcgatgattttcccacatttgattttcctgcaaatgcaacctccggtctgttggtgtccgggagtttgctggtaataccgcatacgatatctaatgatacattcttaataaccattgatttcctctcttttttcacaacaaatggtcaatctttactgactgaccatttattttataccagtgccttattaagcacttccttcatcgaacttacaaaggtaatggtaagtccgtctgtgatttccttatctaattcctgaatatccggtttgttttctgccggcactaacacctctttgatcttagcatattttgccgcaagaagtttttctttcaaaccgccgatcggaagaactcttcctctcagtgtgatttcaccggtcattgcaaggtctgcccttaccggcttcttaataattgcggaaaggattgcagttgccatggtaatacctgcggatggtccgtcttttggtactgccccttccggaatatgcacatgaatatcgttttcctggaaaaattccggctcaactttatagtcagaagcaatggaacgaatgtaagtaatacctgcctgtgcagactctttcataacatctcccaactgtccggtaagcatcagctcacccttgccgggcattacattgacttcaatctgcagtgtatcaccgcccacctgtgtccaggcaagcccgcgggaaataccaatctcatctttcttatttgccataagatagttaaaatgctcttttccaagaaaatctgacagattctttgaagtcactgtaactttctttttatcttcttccatgatcagacgtgcagtttttctgcatatctgtccgatggttctctccaggtttcgaactccggcttcttttgtataattgttgatgatcttcttaagagccgctgactggattgtcagtttacctttctcgataccgttctcttccatctgcttcggaatcagatgctcctttgcaatatgttccttctcattctcagtataacctgcgatctcgatcagttccatacggtcaagaagtggtctcggaatgccctgaacatcgtttgcagttgcaataaacagtacttctgaaagatcctgtggaacctctatataatgatccataaatctgctgttctgctccggatcaagcacctcaagaagtgccgcagaagtatctcctttataatcactgctggtcttgtcaatctcatccagaagcatcagaggattgctcactcctgcctgctgtaatgctgcagtgatccttcccggcattgctcctacataagtctttctgtggccccggatctcagcctcatctctcacaccgcccagacagatacgtacatatttcttatgcattgcttctgcaatcgatcgggcaatggaggttttacctgttccgggaggtcctaccagacaaaggatcggactttttcccttatgtgtcagtttgcggacggaaaggaactccatcacacgctccttcacatctttcagaccgtaatgaccttcctgaagtactttccatgcttctttcagatcatcagaatctgtggatttcttctcccacggaagtgccagcatggtctcaatataaccacgcagtactgcattctcggatacattgctgttggtattcttaaatctctcgatttctttgctgatcttctcttttacctcatcgccggcctgaagttcctggagtttcttcttaaactcctctgcgtcatccgcagtattatcctcacccagttcctcacgtatcagtttcagctgctctctgagaatatattctctctgattcttatcaattctggccttcacttttttctggagatctctgccaatctgcatgatctcaatctcatttccaaggattgcacccagaacttcataacgttcctccagtgtaagtgcctccaggatcttctgcttattctgataagataaaggaatatttacagcaatttgctcaaccagttcctcaacattatctatatttaaaatctgtgctaccagctctttgctgacttttccattttccatgcagtatctgtggaataattccttaaggcttctgtgcatggcttccatcactggttccggcatctgcatttcttcttcatcaacaggtgtgatctcacttctgataaacggaaactcctgctcaaatttcacaagtgtggctcttcccgttccctctacaagtacccgcaaaaggttctgcggaagtttcacaacctgtttgatataggcaatggttcctacatgatatacacctgccagatccggtgattccacctcaggatcaatctgagtaaccagaaaaatcttctggtcatgaagcatggcagcttcaatcgccttgacagaacgctccctgctcacatcaaaatgaacgatcatcccgggaaggatggtagtccccctgagagcgatcgcaggcagcactatattctgatttgtcatttattgttcagtccctttcatcaggctgtttccggtttatccttcttgtgtgtccgggacgttcttctgcttccggctgtcttcgcctgtgcaggagtttctccgcggacgatctccggctcaccggtgccatctactacatctttggtaattgtacacttgcgaatcgtgtcatctgacggaatcttatacatcagatccatcagtgaaccttccatgatcgcacgcaaacctctggctcctgtcttacgttccagagatttctttgcgaccagttcaagtgcatcatcttcaaaatcaagttcaacaccatccagttcaaataatctgtgatactgtttggtaagtgagttcttcggctctttcagaatactgatcagcgcattctcatccagcgcatccagagttacaactaccggcacacgaccgataaactcaggaatcaggccgaatttgataaagtcttccggcattacatccttcaggatctcacctacatttctgtcttccttaacagaaacctctgcaccgaaaccgatggacttggtatcctgtctggactcaatgatcttctcgattccgtcaaaagcaccgccgcagataaacagaatatttgttgtatcaatctgaagaaactcctgatgaggatgcttgcggccaccctgaggcggaacacttgccactgtaccttccagaatcttcagaagtgcctgctgcacgccttcaccggaaacatcgcgggttatggatggattctcagattttcttgtgatcttatcaatctcatcaatatagataattccgtactgtgcacgttcaatatcataatctgctgcctgaatgatcttgagaagaatattctcaacatcctctcctacatatccggcttctgtcagtgtagtagcatctgcaatagcaaacggtacattcagaagtctggcaagtgtctgagccagcagagttttacctgaacctgtaggtccaagcatcagaatattactcttctgaagctctacatcagaattttttgatgcaaggattcttttatagtgattataaacagcaacggaaagagccttttttgctgcatcctgaccaattacataatcatccagaactgcatggatctcttccggttttaacagattaatatcagaattcaaaacctcgtcatcataaggatttaattcttcctccatgatctctgagcagatgccaatgcactcatcacatataaatactttgccatccggacctgcgatcagttttcttacctgatcttctgtcttctggcaaaaggagcatcttacttttccttctctcattttttctgccatgaatttatgtctgtcctttctctatactaactaataagactcctgtgacgattcacaggagtcttatctttcgcattatttatgcatgactacaccgtcaatcagtccatatgcctttgcttcttcagcagtcatatagttgtcccggtctgtatcacgctcaacaacttctatcggctgaccggtatttgcagccaataactcatttaaagttctctttgtctgtgcgatatgatctgccacgatctggatctctgttgcctgtccctgcgcaccgccggatggctgatggatcatgatagtggaatgcggaagagcaaatctctttccttttgcaccgcctgccagaagaaaggcacccatgctggcagccattccaagacaaatggtagaaacatcgcatttaatatactgcatggtatcatagattgccatgccggctgttacggaaccgcccgggctgttgatatacagctgaatatctttaccaggatcttctgcttccaggaaaagaagctgtgatacgatcagtcctgcactcacatcatttacttcctcaccaagaaaaatgattctgtccttcagaagccttgaatagatatcatagcttctctctcccctgcttgtctgttcaatgacataaggtactaaactcatataaacgcctccatttacgcggctgacttttttccgaaagaggcagacatctgagcctgtctctttccggttcttaaaattcgattactttaaaattaaacttccttagcagcgtcagcgataacagtaactgctttctgtacagccatgtctttcttcatctgctcaagttcacgctctccaagtaattcttttaacttgtcagcttccattttgtatgcttcagccatcttggagatttcttcatttacttcttcctctgttggctgaatgttctcaacttctgctactttctcaagaaccagtcttgtctggattctctttaatgcctgtggtttcatgtcttccatcatcttgtcagctgtcatgccagtgaactggaagtactgatccatggataatccctgggactgcattcttctgctgaaatcatcaagcatctgacggcactgtgtcataagcatagcttccggaatatccatctgtgcattttcgattgctttatctactgctgcatcttcttttgcacgttttgcttcgtctgctttcttatcttcaagatttgtttttacatgctctttgtactctgcaagtgtatcgaactcagaaacatcttttgcaaaatcatcatccagttcaggaagttcttttgcttcgatcttcttaactgcgcatttgaagattgcttctttacctgcaagttcttttgcctgatattcttcagggaatgtaacttttacgtctacatcatcgccaactttagcaccaacaagctgttcctcgaatcccgggataaatgtgttggaaccaagtgtcagaggatactctgtagcctgtccgccatcgaaaggtactccgtctacagatccttcgaagtcgattgttacgatatcatttaactgagctgcgcggtcttctacgctgattgttctggagtttttctcctgctctttcttgagttcagcttctacgtcttcgtctgttactgtgatttcagttttcggtacttctacacctttgtaatcacctaatgtaacttccggtttaacagcaacttctgctgtgaagatgaatgcttttccaggctcagcctgtgtgatgtcgattgtcggctgggaaacgatctcaagttcgcattcagctaatgctttgctgtagtgttccggaatcagagcgttaacagcatcttcaaggaatactcctttgccatacatctgctcgatcatttttcttggagcttttcctttacggaatccagggatggaaattcttccttttgctttctggtatgcattctgcattgctttttctaaatcttcagcggcaacttcgatagtaagtttagccatgtttttttccattttttccacctgtaaactcatgttacaatgttcctccttaaattcaggttatattttgcgactggtttttcagctgcgttatatcattcacagtttttacctatttctatatattcaagtctgagctccgctcccaccattgcagaagcgggagagttactgttcactctgtgtcagtaacgcaagaagtctgtttataactcaattatatatttacagtcattgtagcagtatagcacaaaaaatccaaaagtgctagtgttttttcgcataaaaataagggttttgggatgttttaacgtgtgtaaactacagattctgcgatttcttttgctttttcttcattttcgagctgtgaaatcagggagagtgcgaagtctacagccgttcccaggccgcggctggtggttatgtttccgtctactactacgctgtcttcacttgttactgcgccatctttggagagaacttccatgaatgacggataggaagttgctttgcggcctttgaggaatcccagtccggaaaatacgcttggagctgcgcagatggctgcgatttttttgcctttattgttgaagtctgtcaggaggtcgatgagtggtttgtaaccggcaaggtatttggttcccggcattcctccaggaagaacgagcatgtcggcgtcggcgaagtcggtttcagcgaatatggcgtcggtgagcatggtgatgccgtgggatgtctggatccgggtggtttctttgatagatacggttttgatgtcgattccggcgcggcgaagaaggtctactacggttaagccttcaatgtcttcgaatccatcggcgaggaagatgtatacttttttactcattttttgtgcctcctggttgttgtattttttaagatttttatcttgtttttctgaaatggattatagcattttttatggatagttacaatgtttgtttggattgggtagggacactgggcagggacgcgcgaagccatctgtctcctggggttcagtttcgtgagcctaagtaactctaaggtttggtaaatctgctaaaaacatgaaaaagaatgcaaaactcgctccgttgcaaacttcgctcagacacgttgcgattcttttccataacgcagatttctcaaacctaagagttactaagactcgtcaaattcaccccaggagacagatggcttcgcgctgggaactggcaaaatgttacttttaccatatctctggtttcaggtctttcggtaatggattgggatatgtttcgccgtttagagtttctgtcagttcttttctggcttgatttgccagttctggattttgtaaaaaatccagggcagtgagagccatgattttggcggcgtagagcattcctttgtgagctattgaggatttgccctgggctactgtctgccaggagtggagagcggttcctgcggcgaatgtggggatgttgaggtggacggttggaacgatccagcttacgtctcctacatcggtggagtatttgaggtcgctgtacagattttggcaggcgattggttcgaagattggggttttcattgcttccggtgctttgggaccaaagtagtcccgggcaattgtaggaagttggtttttgtcctgatccgagagggactgctggaatttttgtgcgtaggcatattcctgctctgtatatggaatcgggccaagtttttccaggtaggtgttcatatggtctgcaaggattttgctggaaatcaggtttgagtaagcggctacctggcggatttctacggtggtttcggtcatgagggcggcgcctttggctatattacatacgcggttgtagagttcttttacctgagtgatcttcggggcgcggatggcgtagagtacttgggctctggactgaactacgtttggggcatctccgcctgtgtcggtgatggcatagtggattctggcttcgtctatcatgtgttcacgcatgtagtttacgcctacgtccattaattctactgcatccagtgcggaacggcctaattccgggcacatggaggcgtgtgccggggttccgtggaatgtgaagaagactctgaagtttgctttggtgcttccgtagcatgcgcgtcgtccctgttccgggtgccagcagagggcgaggtcacagtcatcgaaatagccgtcgcgtacgagaaacgctttgccgcctgcgttttcttcggctgggcagccgtagtagcggattgttcctttcaggttgtgttctttcatgaagtcttttaatgcgatgacggaagcaagggtgcctgttccgataagctgatgaccgcagccatgaccacaattatcagtatgtcctgaatctggattttgtttcttttctctttccggcacgctttcatattttgaatctgatgttttttcttccgggattctctcggtagtatctgctttctgcgaaagtcccggcagggcatcaaattcgccaagaaatcctataaccggttttccggaaccgtattctgcaataaatgctgtttcctctcctgccagatttgattttatggaaaatccctctttctttaatgactgctgaagtaattcagaagatttatattcctgaaatctgggctctgcaaacttccagattttatcgctgatttcggcataatattcttttttatcttcaattttttctgatatttcttttatgtattcatccatatatttttcctcttgtcccatgctgtttcctactttcttcttcattccccacaacatttttatctattttacattaagcagatatcatgttactgttcacataccactatcccgagacatacaagccaaaattccattgccgcaggcaatctggaatgaattttgtctacgttactgtgaacggagtgaacattaacgatatcaccgtttgatttaagtaaaatatgcgttttcattatttttcatatatgctattatcattatagcacaaactaaaggattgacacattttaactcaatggaggaaatttaaatggaaatcgaacgtaaatttttaatatccaaagaaaatctgccagcagatcttgatgcttatccacatcacaaactcgaacagggctatttatccaccgcaccggtagtccgtatccgcaaagaggatgataactactatctcacctataaatccaaaggtcttatgacccgcgaagaatataatcttccacttacaaaagaatcctacgaacatatgcgtccaaaagctgacggaatccttatttccaaaacccgctatcttattcctgaaaaggatggactcaccattgaactggatgtatttgatgccccctatgagggactctatctcgcagaagtggaattttcttctgaagaacaggcactcagttataatccacccgtatggtttggcgaagatgttacgaactccggtaaatatcataacagtcgtctgagtcagggaaatttataataaaacagctccgaaatattgttctgttaatatgtatttgcaggaattgtagtaactcttaggttctggaaattcgcgttataaaaaatccgctcactgtctgagccgctttgcggcgagtttgagcggattttttatggttttagcggattttcagagccttagagttactgagattacatctttttacctttttcagcagctccattcagagcttcaaaaacagcacttctgaatccattctgttccagaattcttactccctcaatggtacttccggccggtgaacataccatatccttcagttctcccggatgcacgcctgtttccagtaccatttttgcgcttccaagtaaagcctgtgcagcaaactgataagcctgttttcttggcattccctgggctaccgcagcatctgccattgcttctatgaacataaaaacatatgcaggtgaacatccgcttacagcacttactgcgtccatcagacgctccggaactacttctgtacgtccaaagctgtctgtgatctcacagatctgagccagttcttctgccgatactttctcattggcacatacaccagtcataccctccccaacctgagcaggagtattcggcatcattcttaccactttcagaggctgtccacatttttcttctaaccaggcaagagttttccccggcgcaatgcctacaactgtgtgttccggtgtcagttcatcttttacttcattcagcacttcttcataaaactgcggtttcacggccaggaaaaccagttttgtgttttttaccacttcatggttatccagggttgtaaccactcccagcttttctctgcttcgtttgcttccttcttctgtaagattggaaacaataatctcatcttttttataaagtccttttttcagcataccactgatcatggcagaagccatatttccgcatccgataaatccgattttcataaatctgctcctctcttgcaattcctgttgttttctgataatttataactgcttttttcatatctttttcttgttatagataatgataatcatccggcaatctgccgtaaaatactgaacagttacagataattataattcattactgtccaatatgactgtaaagggaccgtcattcacaagctccactttcatatctgccccaaattctccctgctcgacaatatcaatgtgttctttgcatctggcaattatgtatttgtacagattttcagccatatcaggggcccctgctcttataaaggaaggtctgtttcctcttttacagtcagcatataatgtgaactgggaaataagcagaagacttccgcccacctccttcaggccaaggtttgtcttaccgttttcatcttcgaaaatacgcatattaaccattttatgaatcattttatctgcgatttcaacggtatcttcttctcctactccgataagaaccataaagcccttgcctatctggcctcgtacttcaccattaattgtcacttttgaatgcattactctctgaattacaaaacgcataattcactctccttaatcaacggatttctgtctgttgatagatagcatagcacatttttatccgtttttccattgtaaagtgtcaccttgcggctgttatctcaaaatcttgttactcgtcactccgttctcagtaatgctgcacaatttcctttcatcatcttataataaaccgggatcagaagtgcacaggctccgatccatgccattggactggcaatacatacagatgtatatccgataattccggaaagacctactgttgcagcaattcgcataaccagttcaatcatacaggcagcaaaaggtgctttgccattctgcatgctctggatggatgtacggtatactgccagcagtccaagcacaaagtaaaagggagctacaatcgtcagatacatatctgaatagtgatagatttcttttgtgggatctgagagaaacattcttacgatcggatgtctcagcagcagaattccaatacacatgatcaggttaaatgcttctgtctgaatcagacaggcacgcacaccctgacggatacggtcccatctgcctgcaccaaaattctgagccacatagttggaaattgcggtcatcattgcattgtttaccagtacagaaagctgatctgctttcgatgctgcggtatatcctgcaactgctgcagtacccagtgagtttaccactgcctgcatggcaagctgtccgatacacatgacagacatctggaatcccataggaaatccggtcttcaggtgcaggactgccgtgtcttttaaatctgtaaaatcttccctgtgcagatgcaaaatcggaaaattcttcagtcctacaaccagactcagcactgcggaaaagaactgtgacagaatagtcgcccatgcagcaccagccacccccatatgaaacggtacaataaacagaatatcaagaaaaatatttaatacagatgaaaataccaggaaatacaatggtgttttactgtctcccaatgcgcggagcatatttgagatcatattataaaaaacggtagcacctgtgccaagcaaaactacaaacatatagtcatatgcttcaccggaaatatcagcaggaatctgcatccagcgcagaatctgatgagaaagcagactgcagatcagtgtcagcactactgtaaacgcaatactcagaagcgcggaaaccgcaacactcctgcgcattcctttttcatcctttgccccgcatttctgtcccagacaaataccaaagccacctgtgaatccattaataaaacagaatacaaaataaataataatactggtggaacctactgctgccagggaatctgctcccagcgtttttcctacgatcacagagtccgccagtgtataaaaaagctgaaacagatttcccagaattacaggaatcgcaaatttcagcagtgaccagaacggattgcctgtagtcagatccatctcttttgatcttgccatgtttcttactcctctccttgcacgatgtgcataccaacgttataattgtgactataacaagcattgtaaatgaatatatcctgtgataaattgtcagatcgtattgatgctcatgcttctgtgagcaattcatcacagtgtacatataataaaatcggagaactgtaatatggctatgcgtaaaattcttgtagatgaaaccaaccgcgaactttatgaacatgggactgtcggttttcccatgaccgttaaccatgatgacctgtgggcatttgagggaaaaagcgtacctatccactggcacaatgacctggagatcagtcttcccagagaaggagaagctatctatcaggtgtaccggaaaagctacactgtcagacctggagatgttcttcttctgaaccgaaatgtacctcatagctgtcactcacctaataacagtcatgccagatacagtacctttctgacacgtccggatttcatatacggcgaatacggaagtgatgttgaacgcagatgttttcgtccttttctccagaattcttctgtcccctgcatccttcttacttccggaaactcatgtacccggactgtgatccaaaagctcaatgaaacagaagcactctttgatcagaagaccttctgttatgagttgaagattaaggggcttctctgtgaaattttcggtatgattctctgcgaacaccagaatgatcttgcaaaatttattccggccaaccagctggaactggaaaggctggaacaaatgctggattatcttaatacgcattttggatctgtaatctctctacaggaactggcagaccaggttcatctgtccagagaggtctgctgccgcctgttcaaaaaaatgaccggcaagacaattaccggctatctggaagaatatcgtgtcaacaaaagtctgcctctggttcagagctgtcaatattctatgatccagattgcagatatgacaggcttcagcaatgccagccgttttgcccgggcattccgccgacaattcggatgcaatcccggtgaatacaattctcttaagcagcaaaagtgctagagcgtgtctgaaaaaggctttctgcaagatgtgcgtcacactttgtgggatattttgcccggatgagggcgccgtagcgggctacggcaactgaattcgggtgaaatatcccgcaaagtggggcgtgcagattgcgggaatgatttttcagacacgctctaacctgtatctgttcttttatatggttatccttctgccgcatggatattatattaggattctgtgtcagaaaccattccggtattgatttacatgatacagatattgactttttcagacctattcttttcaaaaaagaacagcccctttgacttattatgcgtcaatgagactgttcttttttattatttgtgttcaatcgaagccggggacttacttgatttggttacatcccaagtgtgtcatttaccagaatcacatggattctgtctttatgtctggaatatctggtgatcaggaactgacagcagatggtatccggggatttgcagtcaaagcattttccggtttccttacatggagttttgatatcaaatctctgtgcattagctgtagctgctacatttctggcacgcttcattgcgctgtcaagatccggacagactttgtttatacctacaataaagattacttttttcgggccctgggcaatgcaggatacacggttggaattgccgtcaatattgacaaggacgccatcatctgtgactgcattggcactggataaaaagaaatctgcatcataggctgccataagtccctcacgaggttcaagctttgcgcggtcaatataattataatctccatcctgcagggctttgaccagaccgatctcatgtgcactcatgcatccgcccatggcgattgtgcttccgtttgggatcagttccagggcctgctttaatgctgtttctttatcttttgcataatacccggacatattgcgggattccagtcccttgatcactgtttttgccaaaagttcgtttctttttttcatgtttgcatccattgttgtgtcctccttaaaccagatttttatctactaacaggagcataacacatcttcatctatttttctattataaatgaacacatcttttgtgtaagttatccatattattaactgtcacttcgcagctaggatatagacttatatcttccacttttttcagagtaatcaatatgctgtcgaaaagtctatctgtcttttcgccgtcttttcacaatttctgactggagaaacgaagtatattctgataaaataggcatataaaggaggacaagcggaaatccttacaaatgataaaagcaaaaagaacagccgaagacattttcaaggcacggatgaggactatacttaacgaataagggagtaccttatggcaaacgctaaacacgaagatgctgttatgaagatgggcttcgactattttcggaatacgattcttaagactctaggaattgattaccagtatgaagaaatcggaccaacagagctggtggaactgacaattcagtctttgtatatggactttacctttctgactacgggtggtttctatatacatacagagtttcagactacagataaaaaagaagcggatttacgaagattccatgcatatgatgcagtatattccaacaagacagggaagaaagttattacttacgtcatttattccggagggattacgaatgtgaaatctgaactggactgtgggttatatacttacagagtgcaaccaatttatctgaaaaacaagaatgcagatgaagtattccggaaattaaagcagaagcaggataacggtgaagcttttacggaagatgattactcagctctttccctgacaccattgatgtccggaaaaatgagccgcaaggatatgtttaaagaagcaattcgtctggcaaagcccaatattgagctgagtgctgaaaaggcaaccgcaatgttgtatacactggctgacaagttcttagatagaactgagttagacgaaattaaggaggtaatgcgcatgaccagacttggacagatgttgcaggatgaagctatagaatctactcaaacagaatctatcaaaaatcttatgaaaaatatgaactggaccattgaccaggcaatgaacgctttggaaatttccgaagataaacgtgaaaagtaccgtcagtcaattgctccaaacaattaatggataaaagtaccgccatattaacttatcacaatcaatatggcggtatttttcatcttatctgtattgtaaaattatctcctattggtattgctgaatctatagggctttcgcctccatcatatacataggttgtggattcttcgtagatatcatcagagggatccttatccattttttcttcagacacctgatgcgctgtgtcgttttttacttcatataactgtaatgtgattgtgtttgcttccggggagatttcttcatatccgggatatagacctatcgtttgccggaacatagtttcctgaccatttcttcctgtttcctgatagcagattttgtttccctgatcgtctgttccaatcagataataatcactgtcaatatatactgttccatgatacattccgtaaattgtactttcaaatggattccatctgaattctgtgagattcaggacattggaatccattttaatattctgattcagatttaaatccacagtgtttttttccagctcttcttttgatgttttaagtttaaatgtataaggttctgtatcagcctgtgttttctgaacattttcccatgtatcagcatcgtccattgcaatcggccagactttgaactctatgtttacagttccctcagtgttgacttcttctccgattgtaaaatcttccactgttattggattttctgagaaagcattaactgttctttggcctaagccctgctgaatttcctgaccgttaatgcatacttctgtatataaaagtttgtcttccaccgcatccttcatatctgcgtctaaatcttcgctgtcggaatacgcaatccataaatttttgctgtccatcacaatctcatttaatgttatggtgattccatctcttgaaatgctttttcctacaacatttgtataagaatcggtatcaccgttcttaattcccaatgcctgtccgatccatgaagttactctctgtaatgctgcttttacatcttcctgatatcttaatgtgcatccaaccataataagcaatatgatcccggcgactgctgttttccaactcctttgtatatggaaaaaacgatgctgttttttccatggtctggaagcttcgtaaatatatttatcatccagatcaccaatcagttctaatgtcttaaatcctttttccatataaatgtttcaccctttcccatagtttctttctgcttcgatagagactggatttgattctgctttccgaaattccatgccgggctgaaatttcactgatgctgtccatataccagtagcgtcgtataaaaatgtcacaatcaccttttttcagggattccagaaatttttcaaggatttccagaatctcttttctctggatttcatcattcaaagaatatgctgttacatcctctatctcttccagttctttgcataattctaatatgtgctctgttgaccgttttgcagcttttttcctgcgaaaacagtcaattgccaggtttcgggttatttttccaagaaaagcagacagaattgccggttttctgggtggtatggagttccatgtggctagccatgtatcattgacacattcattggagtcttctttatcatacagaacattccaagcaatactaaaacagtacctgctatatttttcttcggtcgcctgtatggctttttctgatctgtcaaaatacagattgataattactgtatcttccacttttttcacctcacgtttcttttatttgccttcataagataagacggattttgaatggtaaagttgcaattttaataaaaataattttctttttccagagtaaataatacactgtcgaaaagtcaacctgtcttttcacaatttcgactggagaaatgaagtatattctggtaaaatgagcatataaaggaggacaaacgtaaatccttacaaatgataaaagacaaaagaacagccgaagacattttcaaggcacgaatgaggactatacttaacaaataggggagtacctaaccgatttatctgaaagataagaatgcagatgaagtattccggaaattaaagcagaagcaggataacggtgaagcttttagagggtgtaaaaattcttgtgtctatggaaagtaaatctttctgataagaaatagatatgtaaaattttgctgtcgaattaatgattatgcggctgtcgaatatatctttgtacttacagtattgccatgtaggaaaattatatacatcattttcgatttttttgcatgacaagtaaggcatcatgatcattgccttttgtgggctctgcccacacccgacctctggaataggatcggaaatttctggcaataatataaatgccgaaggaatagacagagagcaggaatgaggggcttaaaagagcttccccattcctgcttttcttttctcttacagataagcagtgagccgttctccgtaaaggactatcagctgattcaatacctgatcccagttccggtatctctgcgtccactttttgactacgttctcgctggcaagatacagcatcttttccaatgcaggatcgcttgggaatacgcttttcgttttcgtgactttccgatactggcggttcaatccttctatgatatttgtcgtgtacataatgcgtctgatatcattagaaaactggaaaaaggaacttacatcttcccaattattttcccagttactgatcgcgtacggatatttcttcccccatttttctttcatgttctccagctctgttaaagcggctgtttcgttcggagcattgtacacttctttgaaatccgaggaaaactttttcagatcattataatttacatatttgaaagaattgcgtagcatatggatcacacatctctggatctctgcctgcggataaactgcctgaatagcttctttaaaactcggaagaccatccacgcagaagaaaaggacatcttttactccgcggttcttaagatcattaagcatcccaagccagaacttgctggtttcatttgcgcctgctgtgatgctgaggatatctttgtatccctccactgtaacgccaagaactacatacgcagcacgactcaggattctgccatcctcacgtactttataatgaatacagtccataaagacaaacggataaaccgggttcagaggacgggactgccattccttaacctgaggaagtatcttgtctgtgatcttgctgaccatttcagctgatagctcaattccataaagatcctggagctggtcgtggatgtcacgtgtactcataccacgggcatataaagagatcactttttcctcaatcccggaaatatctctctggtatttagggatgagttttggttcaaactcaccgttacggtctcttggtacatcgatttgaaattcaccgtattgactctttaagttttttgtagaatgaccatttcttttattgtctgtctgtagatctcccttatggtttttctcgtagccaggagttgcatccagttctgcctccatcagctcctgcaggatatccttgaaactgtctttcagaagcgtgtatatatctgcaacgctattaatgttgttttctgagatgatctgtcgaatttgttcttttgcaactgccataaaaaatactccttttcgataagaattgtcatatctaaattcttaccaaaaaggagttattttttaccaaaaacacaaactattttacactaccagcttttacggaagatgattactcagctctttccctgacaccattgatgtccggaaaaatgacccgcaaggatatataatggtatcattttgacagatgccacttattttgtttaactgttcttgatctctttttcaattcgttccatgattatatccgttaccgcttttgcccttttcctcacactattactatattctttagccgcattatacaacaatatatctgtctcattctgggcattatctatactttctttaaatcttttgttttccttaaaaatttcatatggtattatcatactaacctccaactatatcttttaattatcttcgttttttcaatataccattttccatttcatatacttcatcacacaacacatcaatatcctctctattatggcttgccaggataatcagttttccctcgtttttcatctgctcaaacagtcccctcatttcctgtaccccatttttatctaaaccgttcataggttcatccagtattaaaatatctggattttccataatcgcctgaccgattgctaaacgctgccgcataccaagagaatattttcctacaggaatttttgaacgtggttcaagtcccaccttttccagaacggaatacatgtattttttattcagtttatttcggattgtatacagaaattccagattatgaaacccgctccactggcgcaaaaaacccggttcttctataataattccggcattctgcagcatgtcggcatctttccccatacatttcccatttactctgatttctcctctgtcacagtaaaaaaatccgcagatacatttgaaaagtacggttttgccagacccgttatgtcctacgattccgtatatttttccgctttcacaggtcagcgatacatcttttaacacttctttttccttaaagcttttaaatacatgatttacttcaatcctctgtttttccatctgtcctgtcctcctgtctgtaagctacgcgtcctcattttcccagtgaaactctgtatgttttactttacagaaaattatcacagacatgaaaacaaccgcaacaattaaaaatgtaaaaatatatgtcagggaagggattcgataacgtccgctgacaggcgtcgcgcttaatgccacctccgcccagtatgtaggtacaacatgcgccacaatcagtttccattccccatatatattctccacaataaataatgcaaccacactcatcattgtcactgcgactgcaaggattttaccggcatacaaactgataagaaacatcaaaatgccaagaaacgtacatatcaatgtacatatcaggacagtaattatcataagctgtaccggcgtaaatttcccaagaatcccataatggaagcgaaaatcaagcatttgccccattccaaatccaaatccctcatctgctctttgcgaagcgagcgtttttataacttttccccagtctgtcgaaaattctatatgtccccaaaacggaagaacagctgcgattgcagacaggataactgcaaaaaaagaccttatcaggataccggcaatctggctgagtgcccagcgttccctcccggtacggattacctgatacatattaatatgctgcataaatggaacatcagaatgaatataaacaattcctacataaaaaatagataaaattccaaatgaggacatataaaaaggaaaaatgcaccatgaaatcggataatttttttccttaacaaactgtaaatatggctgatcatacgtccacgacaagattaaaaacgccgcgcagaaagtcgcaaatttaacattaaatattttttgcgcagaagttttcattatgtattttaatgttttcatatagtcctccctccgctacattttctttttcagcccccaatagcaccccgcggctgatagagcggaaatgcccactgatataaccgtcagaaacaaaaggtttactccgtcacttgcaaatattttcgtatacgcataaaaagcgtagatattgtaatcagctatattcacagataccagaacgcgaaatgccagtaccggaaagacaagaaccagcacagtatttgatataaacacagaacataaggcagccatattcgacaatgcccccgcaataagccccagattcaatgcgtacagcgtacagtataaaattacatgtccctcttccagaatgcttccataacagccgtttaattctattccatacgaatctatactccagtctgtccacggaacatatgtacggcacaaaaacagaaacaaaactgatcccaatatcataatgctcagtgaactgatatagataacggttgttttagatagtacatatgactttaagcttcctcttatcacattgtaacgaatatacttatgctcctgttcttccggatatacccctgcaaatggaaaagcgcagaaagaatatgcaatcagaaatcctgtcatatttgtagaatacacataggtagacagtacgtttccattttcaagccctttttgaaacaacacgctttccagagaaaaaaacaggattgccactacaccaacaattccagccagccatcgataactttttccaagccggcgaaaatctgtccgaaggtaatttataaaacactgcaaaattatcacactctctttctcaggcaaaatctggtatgacaagcgttgctaattcaggaaaatttcagttcctgtaaccgcattaagcaaagcaacctccatagaagtaccgtctgttacttcaaaataccagaccggctctgccgctaatttctgaccctcatcaaaataagtccgcaggactaattttgcataagtcaccgtataaacggcatcgtctaataaagcactgtatttttcttccagtatatctgcaatttcagggaacttcagaaactccagggtttcatcagaatgttcaaatatacatggcgcttctgtcagtgccagactcaacataccctgttttgtgtaaacagcagatatgggcgctttctgatagctttcaaacgcccgtgacatcgcgcttgttatccacggcggaagaacctgcagtccctcataaagctgccacccatatatctcataagaattattggcttctgtccagccgtcctgttttgccctttgactgtcaatcattccgtcatctaaagctcgcttctccaatattgcataatcttctccgctggtagagaaccagtcaaactgatattcatcaacagggcagcccagtgatcttaattcttcttttacctgttctgtgcaatcgtctcctgatgcaaatttaaaattatcttttggagcgctgcgttcgctcattctcactacctgtctgtatattgaggattcgggtgtattgtacagaaacactcccgataaccctatcactgttccgtcctccaatatatacgtatcatttcctttttcattttcaatagttggttcgtcatgatattcttctgtaactacttttccctcaacatattttttgtaagctgtttctgcatcaatgttagaaacaccttttataataggggcgtggaagttggtaacttcaaatttctccggaacgtttactacacactcaaatttcaccttctctgtttcctctgaatatgattccggaaaaaaatctccgtcttcgctctgtaccgtctctccttccggctctgtttttgcctccgtttctttttcacagccccctaaacacatacatattcccagcactatcattgcttgtctcaagccttttctcatatagtcctccttgaaaaaacgaaggcggatttctccgccttcatctacagttttatttacggtgtgaaacgtcccctaacattcaatccacttgttccactggtagcatacatctcgtatgtataattaggcgctgcataagatgtgtagctggcagaggaagctcttgaaccagaagaaatatacgccgaattggagcttgttccctgtcctgcttttccagatctgcatctcaatgtaccgcttttattaaacgatgttcctgttacatagaatctctgttctgtatccgctttccttactgcataagagtatggatcacccggaatcgtcacattaaatgaaactgtatccgcacttgctgtagctgctgtccccagcacacacattgttgcacttaaaacgcaaagtgttcttttaataatttttctcataaatcatttcccctttctaaaaaagtttttcagttattaaacaacattggcaccaacttgtttgttgaatttactatagcatagaattatctcttaaaacgcaccttgccaaaaactgtatataattgtgtcaaaaatggaacttctgtcaagactaatgcctttttgtatattcacacttttttctttattctcctatataaattatttattaggtactatatttccataatccagctatcattgcaatcgcaatcatcacttgactccaaataattgcatctacgacaattctttggtttacccatattcccactagcattacgattccattacataacaaaattttctttgtattattcgcatactttttgcgtgcatcttcgtctaaacaatgaatagtattttctactggggcatatatccaaataaatataacagtaataatccatattattataaacattatatttgataaaactattgtttttttcaaaaagacaaccatgttcatcattgctgtcgatagaaaataacaacgtaattctgtatctgcatgatatcctccagcataaggtctcaaaaaaaatatcccccaaaataccaataatacaaaaggcagttctttccagagtattccacaaactactgttgtcaataaattaagtaatatcagaaacccctgatgcaatccatattggataatttctcgttcttcctcatcatgtccaattttttctatcaatcgtattgagaatttttttctatgcttttccattaaaaacctcattttcttcaaaaacacagttgccacaaactactatgttttcataagaaaactctatagtctatggcaacctgattacttttattgttcctaaaaggaactatatacttccatattttctttaaaaaatcaaccaatttacaaaatcacggttttttcagctttttgacggcacatggaagttctgcctgataaccgtaatacggacatgttgtatttgcatcacgctctgctaactttatagcagtattttttactattttcatacccaatttcaaaatatcttttttcatgttacatcctcctaaacatatattttttataacataccataaattctcttcatatgccttttattgtcaaaaactgtatatttttttgtcaaaattggaactaaaaaagagccaagtggctctttttagttctctacaatatttgacaaatataataaaacctgtacccaaaatcgtttttccgtatattcaatctttatatctccaccacatgcttctactacctgtttcacactttccaaacctaacccgtgaatagatgtatcaatttggctggtttgaaatatattacctttttgcacaattgaaccactataactattttctatcaaaataatcaggatatctttttgcacacgcacactaatggataaatacttttcatcagatttactcgattccctgaccgcattatctaccaaatttcctaaaatcacacaaatattaaaattatttctgtatagtgattttggaatctgaatatccagattcacaattttcaataattcatccgcacgcctgagcatgtaatttaaaaccccatcaatttctttattccctgtcgaaactttttctgctggatttaacataaatttttccatgtgttctaaatatctcatcatatccttattcttatcctgctgtgccatagcagataattctattaaatgatgcttcatatcgtgacgcaattttttaatatgctcctgagattcctgcaccacatcaagctgatgtgcatatacatcaattatctgctccagtttcttctcattcattttcgccacataaaattgggttaatgtgtaatataaataaaacaaaaatgaattgatgagtatcaaactgaatgctactgtaagaactacaggtttgttattttctgttaaagttgcaatgctgtgcatacaaacaatgctaaccaagggaatcatacccaatatgaatacattcataagtggtagagaatcctgcgtttttttctttgtaaattctgaaaaaaaagcagttggaattaaaatcgccaagctagttataaattgataagctgagcctactctttgtccgggaacatatcctgccaacagttgaacaactataatatctgctagtaaattaatagaatatataataaatgtcattaggaattttttagacagctttatcttatacgggcatgccagtagaaataaagcaatgacattcgaaattatattcaaatttggcgattcaaatataatactaacaatataagtcccaatacatgcaaaagtatatagaatccaattatatttccatagacatttttctctggcagcaaaaaaatctatgtaccttttaactgcataaaatcgaattccatttgaaaacaatataagcaacagttcagctatcattacgaatttcatttgccatactctccattagttttcttcttatagccacacggttcgatctgctaatatccaacacatctccgtttatcatttttatccatttataagtaatttctttcgcatggcacatattgatcaaatatgatttgtgaatacgcaaaaacaacccctctggacacatctgttcaatctcagataacttaccataaaaactttctattttcttttccattacaatattaatttttcttccatcactttgaaaatacaaaatatctttgtacataattctgtaactatttccttgatttttatactcaaaattgcactcattttttccaataatactaaatattttctccataacatgatacagccgttctttttttattggttttatcagaaaatcaaatggctggttttgaaacagttctaaagcatattcctttttagaagatatatatatcataaacatatctgtattcctcaatatatccctgatatattttccgacctcaaccccattcattcccggaagttcaatatctaaaaaaagaatgtctggagctttttcttttttcaaatattctgtcaaagtatctccatcaaaaaacacgtccacttccaactttatacatttttcgaacgcaaaaaaactaagcattttctctatctctgaacaagttactttctcatcatcgcatattactactcgcattatttctccatctcctgctattccgtatattactctattatttttatccatgcaagctactcctttcaatttttcataaacttcatctttagaagtatgttagcaagaatataactataaatgagcaagttcgtgattttgcataaaaagaaagacaccttaaatcgtttgtgttgtataatgaaagtgaccaaacaaacattgcaacatttacgaaagaaggtgcctctcacaaatactatacattattctacattcatatacaaccagcttaagaaattaaatttatgcaaatctttttcgaacagagtgatcggtcatctcatgagtatcctgatcagtatctttatctcaggttaccacggaaagactaccgacttttcacaaaacagttcctgccccagaactaccatcgcacatttcctcaattctgggaaatgggatgataccttacttgaaaatactttaaaatcctccgtagttgaaattatttattcagaagcacagcgcaccggaaaacctgttttctgtattgtggatgataccatagcttcaaagacaaagccttcgtcacaggctatgcatccaattgaagatgcgtatttccaccagtcccatttaaagagaaaacaggattatgaccatcaggcagttgctgttatgctttcgtgcaatggcattgtcctgaactatgcttttgtactgtacaataaatccatttccaagattgatattgtgcagaacattgcaaaggaactgccagaacctccagtcatgtcatatttcctttgtgactgctggtatgtttctgaaaaaataatcaacacatttgtacagaaggggttccataccattggagctttaaaaacaaaccgcctgctgtacccgtcaggaatgaaaaagaagctcagcgaacttgctgctgaattatcggtaacagagaaaggatttgaccctgtgacagtcaaaaaccgaaaatattatgtgtgccggtggacaataggggtatttttcagacaatgtaaaacccgtctggcgttggatacctatcagatacgttcctcaaaaggaatccagaggtactggctgttgatgtcaatggcacattatatctgtgttataagcactgggcaatatcagtctttccaggaaggatatcaactgattcgcagtaccattcagcaggaaaagtatcaatatttgtttcaatgtgcaaaatcctgtgtcgattttgaagcgtttatgaaattagcaggatagttttgtgcattttttcaaatttgctcatttatagcttaataattaaagcagaagcaggataacggtgaagcttttactgaagatgattacgctgctctttccctgacaccattgatgtccggaaaaatgagccgcaaggatatgtttaaagaagcaatttgtctggcaaagcccaatattgagctgaatgctgaaaagacaactgcgatgttgtatacactgactgacaagttcttagacagaactgagttagacgaaattaaggaggtaatgcgcatgaccagacttggacagatgttaatggatgagggcatggaactcaaagaaaccgactccatcaaaaaacttatgaaaaatatgaacctgaccattgaccaggcaatgaacgccctggaagttccggcagataaacgtgaaaaataccgcaagacaatcactcctgacaattaatggataaaagtaccgccatattgacttatcacaatcaatatggcggtatctttcttaatacagtttcttacattttctatctgttcatttcattgtgctgcacaatctttctcatatttccaaccagaagcaatgtcagtacaatggttacgattttaaacggaatattcatataactcttacacaaatcccaatatatggcaacgcacataacaacaacagtgcctcctgtccatatgcacatggacatttttgagacatacagggcttttctcgctttggttttatcaaatttaaaacctattttcagatgccgtggatagatatttttatatctgtatgtactcagcacaatccccatcagtccataggaaactataatgcagcttcctcctgctgataaaaagggaagaaatgttactgattgtggaaatatacccagattttccaggatatttatgaaaaagtttataagaaatacgattccgcatccacatcccatcatcattccaagctgattcttctgtcgcatggcagtgttaaaaactgcaaaaatcaaaactgccagaacacagcataaaaatatggctgcaattgttccatatacagatgacagataggtcagaatataatccgcattaaaggtcggtagatttcccattacatctgattcacttttccctatccatttattttgctgccagaatgaatgcagcatttcggtgaaataatcctcttctccaccacctgaaaaaacagcctgtaaacgtgcgatctgatattttgtcagactgcttctcagatacctgatcagaaaagctgccacaggcatagccagaaagccagcccagattccacagatggctctcctttttctcacagtaaaccagttcttttgaattgcgattgtcagcataaccagcatagataccaacatcacacaagctgtcataagcgcaggcatggcatagaccaatataaccggtgcaaacatccatatgattgctcttatcaagcccttatatccccatccatgatatttatacaaaattgctccatatatgggaacataaaacagcatcagagtctgcatggatattcctcttcctcccggcagtacaatgaagcatcttgccccatttaactgatagccacccaacaaggtaaccagacaggaaaacagtaaaatgacagcaattattttcgaagatcttgccagtacagtgtaatccagaagatataaaatcatcataactgcaagtccgatcacgacatggaacacatatctgtccgaaccggccgcagcgttctcactgatttttccggcaatccctgcatgtatcaaaacgcctgcaatgctgataagaacgattattcccagaagtttcaatgcaacctgaggcctgtggacactgtcaagagagattcctgtttccacaggatctcccatatcccggacagcttccctctctgcctgttcacgatccatgcctgcctgcatatttgcctcgatctgatcttctatatgatcctgaaattcctgttttacataaggccgcgcttttttacagcgaatctgttccagtaatgttttcagatattcgtccatagatcacacctccattacaagcacgttggtcactgctgcagaatactctttccattcctcaactttcttttccagaaatccccttccctgtctggtcaggctgtaatactttctggtctttccggctgcctcctgttcgtatactgtcagaaatcccttatcctccagactgtgcagtaatggatacagagttcctgctttcagttcaaacacgttctgagatttctgtcgcaatgtatcgatcatctcatatccatacatatccttttctgacagcaatttcagtataagcattgtcatactcccagaaaccagtgatttttcaatagccatggtattcacctcccattgtatagattgtctatatatcggttatctatataataaaagaacctgtatgctatgtcaactgtttccggaataattttgataacttcactgctacggcaaccgagttctgatatctatatactttttcagacagaaaaaccaccgcattgtcatatagtaacacaatgcggtggtataaatctctcaaaacagatccagcatactgtccagatagattttttctctgacatgtatctggtattccggtctggtcatgtaatagagcagaaattccagtatcagggcactgccaagtcctcttccttctattttgaaatttgaaaatcccattggtagatagatatcccggatatcattgattccaataaaccccggattctctatagcttttgaaaaaagatagcccctctctccctccggtgccttgcagtaatgctccaggcagttttcgcccagattcttgcggctgaccgtttcatagcaggcttttctgtccctgcagccgaaccagcagcattcattgcagagaaattctactttgtccttctcagcctgagacaatgtatttaacttatcaaaagccttgtttagccggaaatccggcacaacataacggaaatcttttctcctgatttcttcctcaagctgtgtaaaatctgtcagaaccttggtagtggaggaaacaaaatagagtcccggatactgctccttaatatattccaagagcaattctgaataaatgatcacgccgttttgcggttctttgtttctctcaaacaaccggcacagtgcattgcattttctgtctgaaaggtgctcctggcgaagcagggaattgctgaaagtcagtcgggcagaaatcccatattcctgcatcagttcaagaacctcctccgggtcattctctccgaagccagccctgcctccaccccagatacagtctgccggagcaccatatatggaaccaatttcacaccagtcataaaaatattccctgtgttcccgatataatggcaaaaacatccggtacagttcataaaactcaaacagcccgggcaggtgaaaatatgctttctccctcattaattttccagcacatcctctatagtttccgaagcatcttcaagggcatccagggcttcgatcagttcatctgcttttcctgtgtgtgtctcctcttcttcatactcatcgatcagtgctgtcagctgatcttttatttcttccagaccttcatagatttcctttagtttttcttcccgttccattacggatgaaagctttacaactttagacattgtgatacctcccatatgcattttctttaggaaaaattataacactgccctctttttatgtctatataatctgaaggcacttgtgatacccgttttctctgtggtattctatagatatgatcattgcgttacgcaaaatataaagtggaggatttttatgttagtttgtgattatattgtagaatctattgatggtgactatgcacatcttcgcagaacagatctgcctgaagaggaattaaagctcgtagcacgggcgcttctgccctttgacatcacagaaggatgcagattacattatgaaatgatgcagtatagtatcattgactgatttgacagtctccgcctcacatccattacaaaaagtttaccagaaaaggcaggtaagtgacttttttatcctttacctgcctgtaacttcacgttctctctgtaatattattttttcatcagatacccatacttacgcatctgtcttcttaacagctgctccacgcgtcttattacttccctgggataattttccgaattcttctgtaagtatatctgaatatctttgaacgtaaattggaaaccaatctgaatgccatacagttcttctgctgcatccaactgtatatcaaaatccgagctaaatggcttcgcctcaattttttccagacaatattccaatgactgatcaataggataatcctgatttatgtcggcaaacatacaaagtccctgatcaaaaaaaggactcagttcatatttctgtgttttttcattataaatgaccgcaatattgttggtatgtctgtcctcattcatgaaaaacgcatctatttccagcattgcagtcagatacgctccaaaattatctattttagtaatttcttccacctgagttaccaggtactgaatgcgttctgaaacatccgcaaaatctgagagctttactgccagactttcacctgtatatcgacgatacaatttttccagcggaatcagaatctgatttgctttcagaaaatccaaactggaacagccctgaaatattttcccattatactcaattacagctgcttcatactcaacaaaagggaaaggacaggtactcttctgcaaaaggtcagatacaagaacttcagataaaccttcatatcccatataatcagccttataccacctgtcatcaattttccatttaagctgatctcccttggaagtatgaccgctcttatgcaagggagaatatgcatcaaaattgcgaatttccatttttgatcagccctccttttttagaatcataatccattgatgatcatctgacatgcgcccctgtgttttttcaataattaataacggatcataaaatggaagtcccatctctctcaaaatatctttcctgtgatcgcgtgttctgggaaaacagcgttcttccagaaaatattcaaaatcagcccaatccggatcagttacaactccaaatgcccggaaaataatctgatctgtgtagtttttaatcttgattttttcatgcctgaaatcaatatctatcgttgtacacagatcatcatgattcatgaaattcatacgcattttcacatccggatcatcagaaaaattataggctcgctttatctgactgtaaatcgtctgacgggaaacgtgatactgtctggcaatatctgtaattttttctccccggtcctgcagtgccaaaatatgtgccagctgttcttctgtaaacgaatttttccttccggtattttttttcttttcagaaataatgctgttattcatatcagcattcaagcatctgtaattgtcggcatctctggatatctgcttcagttcatgaatatctgttgttccaaaaatctgctgtatctggtcttgaaagttcatattcacatcaccacctaaaaagacattatggaaaccactttcacatataacagtttgtgtaattgagtatagcatggagcaaaaagaagtgtcaagaaatagtttcttgacacttctccacccatatctactcaatatgattatatgctttttcttatttcctctccaaaaatcccttggttttccccataacatcctggagaattttcaggttttccagtgtatctgttgtttccagtgaatggtttgcattttcataagtatacattggcacctgctgtttttgtgaaagagcctgtacttcaggaacaatactccatggatctgaagttccgataaaggcaatggcatctctatgaacaaaattatatgtgtatttcaatggtgtgtatagtatctgccgacatctgatgctgtgtttctctgcatatgcggatgctatgattgtgcctacactttttgcgacaaataatatttcatcatatttgtcaaagtcaatggcagaaagacttttctctgcctgttcataaaggctttcgaatgcctgctgcattttttcttcatttccccggatatttccgccatcataagtatagcttaatgcaattgtttcttcatagccacattcctgcgccagctttcgtgaataatataaaagcggcttgtcacaatgatacccgataccagggaaaaatactgctgccttcatgttctgctctccatttaataactgctctatcatttttcatcagattgccagaagattcttgattgcttccatataaaccagaactgcctcttccataccggatacgagaataaattcatctgcactgtggatacgataatcaattcccggcttctcaggtccaaatgcaatgatatttttaagagactttgcataagtgccgccgccgattaccattggtttgttctctgtatcgcctgttacatctgtgtaagctttatataaagcatttacaagtggggattctcttgggaagaataaggcatcaccaattcccagaatctctatacgtccattctcatcctcaagtctgctctcacacatcctgcggacttcatctgatttcagtgttacaggtactctgatatcaattgtacaggagatcacatcattctctgttttgatcataccgttgcaaagagtaagttcgccatactcatctgcaaatttcagtccaatgccttcaccatcgcaggatgtgccgatatgtgtattatagaattccacaaaatcgtccttaaatcctgctttctcgagacattcaaaagtaacacctattgcattgacaccaagagtcggagtgctggcatgtgccggaactccctttgcatagatactgatctgtcccttttcctctgttaccttatattcctgaagctttgtctctgcaagtacagcttccagtctctccttcagtccttcttcggcaggaacaactattgtggaggaatcgcatactgcgttaaagacaaaccctccatctgcagagatgattttcgtgttcttggaataggccatcatctgcaaaagtcccttttcgccatgaatacacgggaagctggcatccggggtaaagccacaggataattcttctgccacttcattataatgttccatacatttggaacctgtttcctcattacatcccataatgagacgtactctcttgttcagcttcacacctgaatcgcgaagaagcttcattgcataaagagcttccagaacaggtcccttatcatctgttgttccacgaccataaacataatcaccctcgcgtgtcagtttaaacggatcataactccagtcgccgcctacaggtacaatatccagatgtccggcgataccaacaatctcatcaccctcgcccatctctgcataaccacagtaattgtccagattgactgttttaaatccaagctcctgtgctatcttaagaccttcttccagtgctttggcaggaccttctccaaagggcttatcctctgcgggagtgccaagctgtgaatcaatggcaaccagccttcccagattggtaagcatctcctctgttaatccatgaatctgttctttaatatccataatttttgcgcctccagttaaatactttctctatctttgaaatatctttatcactattttatcattttatcatattcgggcacaaaataacagcagattgcaggaatgttttttcaaaacacgatatttcagacccactctatggccagataaaattgcagtttccggcctccagaccgtcaatgagaatgttctgacctgtacagaagcggttttttactgccataaagtaaatccactctgctgcctcttctacagacatccaccgtttcagaggtgtgagctccatgatctgatcccagagcttttcatcctccatcaccggccggttcagttcagtcattaccccaccgaaatccagactgttgcatgtggcctgataaggagctatcctcatggccacgtttttcgcataggcaaggacccctcctttacttgccgcatattccggaaattcagaacctgtatgcccgcttgctgatccgatcataataacagaataaatattaggatgaatgccgtaatgttctgtaacagaaatcgtccctttcagatttacatcaatatcatcgccattctgaacccctgcattattgatcagaatatctaccggtccgatttccggataagagcttttgtctctgatatccagacagaaatgcgtatatttcggatgttggatcgaggatatatttttatcaaatccatagacttcatgattttctttcaggaaaaattctgcacagcccttcccgatcccggaggctgtgcctgtgatcagaactttcatcaggcaaaattctccttcatacttttacgcaatgctgtaataagaactgctgctactgcaatacacagaaccctgtcaatgtaatctgtgataaactgaactacaaaacagcttcctaccattccaagaggtgtttttgccagaagctgtacaagaacagttgatccggaagaagtgattcctccaaataaaaatgccgtaatacaggaactgattatggtagatggaagtgtgatcacaagagcagccggaaatatctgccactttttcggctggaattttctgtacacaagacctgtcacaaaaccaagaagaattcctaccggagcataatacagggaataaatatctacagtcattcccatcagcaggccgctgagcagattaggaagcattccataaaagggtcccaggacagcagccacaaatacagttccaatactgtccagataaataggaagtttcagaaataaagcaatctgtcctcccacaaaattaatgcagatagcaaaagcgatcatacagatcttctgtacacttattttttcagttttcattttaaatctcctcgtattaaatcttgtaaaatatccagtttttccggttcctgatctaggatccttgaaagaaacatctgaaagaatccatacacatctacctcagtcagcacccttgcatttgaagttttccgatagaaattcatagaatccacaacagactgtccaagagaaatcccctctgtttcaatctgtacataggaatcaaagcctttacagagttccggattgataaaatatgccactgccaggggatcattgatcacacagccaatgatatgctcccattcccagtggaaatcaaaatagaatttcgtaatcttctttacaaattcccctgtttctttattcagacggcacatatactccagcagatcaggcgtgagcacaatctttctcgtcacatccagccccaccatatggattttctggccattctgatggagtgtctcatataccagggaagcgccgtccgggtcacaccaataattgtattctgcaacaggtgaacagttcccatgacttttaaagctgccgcccatagaaacaatttcctcaatacaggaaaatgcttctttatccttctggatcagtctggcaagattggtcataggtgccagttcgattatggatactttctcttttttcaatacatcagcaagaaaatccacagcactgatctgctgctgataaccggttacttccggcagaaagctttcgccaagcccgtcttctccgtgagtatccagagcattcacgtaatcccgccttaagggagtgctttccccaatgtacacgggaacgtccagacgattcatctgcttcaggattttctttgcatttccaaatcccatctccaccggtgaatttccacacacaatggtgattccgatcacttcgatctccggtgatttcagtgcaagcataatcgcaagactgtcatcaatccccggatcacaatcaataattacttttctttttttcatttaattcctttctgtcaaagtaagtttttttatgttataggaacattacagagtaatttcctataacataaaaaatgcttttgtttatccctcaaataaacaaaagcatcagcaaacagaccacttatgacagctcataagcgaccgcaatattttttactttgcctagttttttatactgggagggtttcgaaccagtttcggtggttattttaacacatatttccatgcctgacaacagttagtgcatacaccatttaagatttgtggcatattctaacagcagaaatctcttaaaggagtatctgcatgaaaaataaaaaatggattgcgctggccgctgccgttgtgcttgctgtgacttcacttcctgtgacagcatttgcagagaaaaaagacagcacagagataagatgcttacaaaaatcactttgaataactgcgcgtcgcattctcgttacttagtgatgagttgatgagttagacgcgcaaattttttactcaaagaaagaacatatgtttacttctggtactatatgtgctaaaatataaccatgggtagtagaaaaaacaacagaatctgagaaatgagttatcagggagaaataaaaatgcagataatatccagttatggtgtggaattacgaaaacagaatatcccgatccgccagacactggagatctaccgttctgctgtcagctatctgattgggatttatgtacaggtatgggaaggattagcagagatcccggatgcaaagaggcgttttaatgctgcagaacatctggtacatactacgaagaaaaaccatgcctgttttgattttgatatccggttcccaaagatgccttcctatctgcgcagatctgccatccggcatgctctggggacagtatcctcttataaaacacggctggatttatgggaaaagacagatagaaagagcgggaaaccaaagcttgtatatgaaaatcacgccatgccggtcttctaccgcgatgtcatgtaccgtgagggagcggaagggaaagacgaagcatacctgaaactctatgacggtcatgactggaaatggttctgtgtacgtctggatcatacagatatggaatatctgagaaaatactggtcagggaaaaaggcatctgccccgactctggaaaagagacaccggaaatactttttgcgtttttcctatacagaagaagtaacacttaccaaaacacctgtgaaagaacagatcatctgcagtgtggacttagggatcaataccgatgcagtctgtaccatcatgcgggcagacggaactgtcctgggaagaaaatttatcgatcatcccagtgaaaaagaccggatgtaccgtacattgggacggatccgcagattccagagggaacatggttctgcgcagacacagggaagatgggcatatacgaaacgtctgaatacagaactgggcaaaaagattgcaggtgcgattgtaagatatgcggaagaaaaccatgcagatgtgatcgtgttcgagtatctggagatgcaggggaagatatcgggaaagaaaaagcagaaactgcacctgtggagaaaaagagatatccagaagtgttgtgaacatcaggcacacaggaaagggatgcgggtatccaggatctgtgcatggaataccagcagactggcttatgatggttccggagtggtaacacgtgactgggaaaatcacagcctctgtactttccagacaggaaaacgatataattgtgacctgtcagcatcctgtaatataggggcgaggtattttataagggaacttttaaaaccccttccggcaacggaaaggtctttactggaggcaaaagtcccttctgtaaagcgtagaacctcatgtgtctatgcagatctgaggaaactccattcagaaatggaatttttaaaagcagcatagatacaggcagatatacagcggactacctgtaatgtgggaaccagccatatccggcatgggaaatacgcataactgcgcacctaagttacaggcgtatccgccgatattcattctgacgcctaaagcgtctggaagcacgtgacttcagtcatgtgaggttcaccgaagtagcacattctattttctatgctccgcagtatgtggcaatcgaaaaaggatattttaaaaatgaggggcttgatatgacgcttataactggctttggagcagataagacaatgacggctgtaatatccggtgaggcagatatcggatttatgggagcagaagcatctatctatgcctatcaggaaggagctaccgatcctgttgtaaactttgcacagcttacccagcgggcaggaaatttccttgtagcaagagaagaaatgccggattttaaatgggaagatctgaaaggcaagaaagtccttggcggccgcaaaggtggtgtacatacatcaatgtaaattatgagacgattgtgattttgtgtaattgggtagacgggttgaatagtgcatttcttaaataaaatgtctcttttgattatgaggatattgatttataataaatatatctttacattaggaggaaaccattttatggcaaaaataattgcattatttaataacaaaggtggggttagtaaaaccactactacttttcatttgggctggaaattagccgaactgggatataaaacattgatgatagatactgatccccaatgtaaccttacaggattatgtttaaatgccgataaggaaaataagctaacacagttttatgaagcaaataattataatataaaatcagcactatcaccggttctcaataatgaaatgcgaccgcttgaagcgacaacttgttatgaatttgaacacaacgaaaatctatttttacttcctggacatatagagttttctgaatatgacgcaacatacaatattgctgaaaatatgacaggatctttagttgtgttgcaaaatgttcctggtgcattaagacaattaatcactatgactagtgaaaaatatcatttggattttgttttacttgacatgagtccaagcatatctgccacaaatgccaacattttgatgggaagtgatttttttattattccatgtgccccagattatttttgctatatggccatagaatcacttattaaagtgtttcctaaatggtgttctacttatgataatttgcgaaaagcagaggtttttaaaaacgcaatttacaagatgaatgatactgtacctaaatttctaggtactatacaacagcgataccgcccgcgaaatggctcgccggtaaaagcattttcagaatggattgacgatattaataaaattgttgcagaaaaattagttcctatattggatgaaaatggaatgcttattcaaaaaagaactaattacaatttaataaatattgcagattttaatagtctaattgctcaatcacaaatgaacaatacacctgtttttgagttgacgcaagaacaagttgaaaagacggggagtgtctgggaaaatatgaaacgtaatagagatgattttagtgttacctttgaaacattagcaaaaacaattatcgctttgacaaattaaacaagtgtggagataccattgatgtatctccacttatattttgcgaaattttgttatctctttccagttaatcggaaaccccatatattcaaaaagatcattcaacttcaaatttgaattccgcttttcatatcggtcaaaaatatgcaataattgctttttaaacagtaaaaaatcagtctttggaagtagataacgaaaagtaatgactacactaaacaagtcattttttccatatatatattttgaaccgtttttagaaatgcctaattttttatgtaacaatgtatctggaatgtcaatatatgtatgataggaaaacaacctttcgttatgagcacatacatttcggtacagcgttaatacctttaaatattttatcatttcatttttcttgacatttccaaaatcctggcaaattgctccctgcatattttgaggtaagaattcaaacatttttgatatctgaccaaaagtaagggtattcataatcacccataacggaatattatgatatttgttacgctggtaaacaagatattcgtgatccttgtttttgtttgccatcatatctagcattttgattaatttggtaattccatttttatttttgggaatattgccgtaattattggagttgagatattcttcttgacgttctccatgttttttacagaagtgataagaaatggacgaacgcatttttctttccacgcggcataaatacttaaagaaaatcccacgtaactcttcatcaaattcataaagagcaactatatcttcaaaacacgcttcattaatgtatttgcgggtatgaatatcaataaaaggatgtttatatccaccaattaatgcataataactgatattctgcagggattctaccgcaaaatcatcatctgtaataactagatttttttcatttttcagtttttcaacttgtgcggtatatgtaataaacggtttgctcatatgtacctcgctgcaaaatgttccagataaagaaaaaggagaggggcctcggcaccctcccccgatcgcaggcttctcaagtttctgcaatctgatcactaaagataatataactgatataactaagaaagtcaatcagaaatcatctttgttttaaattatattcggcaaggacatttttatacattgaccaaggaccaagggggacggtgtttgatggctcaaatacagtcccctctggcttttccccaggtatcatcattcatcctcagaatcatcttcaagctttttcagtctttttttataaattttagaagtaagcgttaatgcaaggaaacataaaatctctatagaaaaaaacataataactccagttgcaatggaaccgacgagtttgtgataattccgataagaaatgataaaccacaaaatccccataacaactgcggcgatgctactggccatgatattgttcttaaaatttggtttcagctttctgtcccagattccgtttcttatgcatcctactgtaagatataaagcaaggcacataaatacgatccattctccggaaagatcctgtttgctgtcatttcctatggctatctgggtcagtattacagccagcaatccccagaaagccagccagcatccattgtgctcaatcttcagaagtttcagttcctgtaattcatccagattacttttcgttttcttcatcctcgtcatcctcccaaaataaatcatccagactcttatccaagatacggcagattcttcggcatagcttgattgttggattgtattcacccttttcgattgcattcatagtctgccgcgaaataccggcagcctccgccaatgccttctgcgtcatatccttttgtgctcgtgctactttgatagcaatattctttggcaagcttgcttcacctccctgatgactataagatatcatttatttgtataaaagtcaattatattttacttttagaaatatataaatgaattatcaagaaaaaatgcaccatttttgagttgagggaatatcctaacagcagaagtctcaaaaggagtatctgcatgaaaaataaaaaatggatttcactagcggcagcagttattctggcggtgactgcgctgccgatgacagcttttgctgcagagaaggatgggggagaggaaaaacttacgaaagttacgttgaatgaagtcgcacactcaatcttctatgcgccacagtatgtggcaatcgaagagggatatttttcggaagaaggtctggatctgacattgataactggattcggtgcggataaagttctgactgctctgatttccggtgaggcagatatcggatttatgggagcagaagcatctatctatgcctatcaggaaggagctactgatcctgttgtgaattttgcgcagcttacccagcgagccggaaatttccttgtggcaagagaagaaatgccggattttaaatgggaagatctgaagggcaggaaagttcttggcggccgcaaaggtggcatgccggaaatggtatttgagtatatcctgaaaaagaatggtcttgaccctgagaaagatctgtctattgaccagagcattgacttcggcgctactgctgctgcctttaccggagatgattcagccgatttcaccgtagaatttgagccgtctgctactgctcttgaaaagcaaggtgccgggtatgttgtggcatccctgggcgttgactccggctacgtaccatacacctcctacagtgccagaaccagctatatggaaaaaaatcctgatatcatgcaaaaatttactgatgctctgcaaaaaggtatggattttgtccagagccacactcctgaagaaattgcagaaatcatcgagcctcagttccctgaaacagatctggataccatcacagccatcgtaaaacgttattacgatcaggatacctggaaagaaaatctggtgttcgggcaggatggatttgaactgctgcaggatatcctggaagacgcaggagaactgaaggaacgtacaccgtatgcagaactggtcaacacagaatttgcgcaaaatgcttcctgatgatttgctttctctgatccacctgtaattttagcccgatatccgtattctcccatccgttccttcatattgtcagagatttttgacttgattcagtcaaaccataatcttgtatacactttgtgtaacaggtggtaaaaagaactatgtttaccaggactgctatagttccaattttgaaaaacgcagacagaatttcgtcattttgtcctgcgtttttctcatgccttttgacagtttgacggaatccccgaatactgattccggcttttcgtcagaatgacaagaaacaaaaaaaatctttgtacgattcttccctagccatcccccctccttttcgctatactgtctacagatgaaaaaaacgagtaatcaatcagcaaaaacaatatgaaataattttggaggaataataatcatggcaagcttatcattacagcacattaacaaaacttacccaaatggtttccaggcagttaaagatttcaatctggagatcgaagataaagaattcatcattttcgtaggaccttcaggatgtggtaaatctactacacttcgtatgattgccggtctggaagaaatttccggcggtacattaaagattggtgacaaagttatgaacgatgtagagcctaaagaccgtgatatcgcaatggtattccagaactacgctctgtatcctcatatgacagtatatgataacatggcattcggacttaaacttcgtaaagttccgaaagaccagattgataaagcagttcgtgaagctgcaagaatccttgaccttgagaaacttcttgatcgtaaaccgaaggctctttccggtggtcagagacagcgtgttgctatgggacgtgctatcgtacgtaatcctaaggtattccttatggatgagcctctttccaacctggatgctaaacttcgtgtacagatgcgtatcgagatttccaagatccaccagagactgggtgctacaatcatctatgtaacacatgaccagacagaggctatgactcttggtaccagaatcgttgttatgaaagacggtgttgttcagcaggtagatacacctcagaacctgtatcagaaaccaggcaacttattcgttgcaggattcatgggatctccgcagatgaacttccttgacgctgttatctccgaaaaaggtggcaaccttatcgctaaagttggcgagcatgaactggttatcccggctgctaaagcaaaagctcttaaagatggcggctatgtaggtaaaacagttgttctcggtatccgtccggaagatatccatgattcccagatgttcatcgaagcttctccaagcgcaccgatgacatccgtagttaaagtttacgagcttctcggagctgaagtattcttatacttcgatgtaaacggaactcaggttacagcacgagttgatcctcgtacaacagctaagaccggtgatccgatcaaattcgcattcgatatggaaaaatctcatttctttgataaagaaacagaacttacaatctgcaactaattttcaggaatctttaataaacccggggagttttccccgggtttttatgttataatatagaattggctgcctgattacttcgatcagacaatttgcaaggattgctataagctgactcataccccaaaagaaaggattgacctaatgaaaatacaacagattttacagaaatgcctgacagactggaagaatatcagccagattgatttctgtctgctggattctgataaccatatctttctctctacctgtgataaaaaacttcctgcagaatcaaaactggaagaatttcgccaaagcagtgccctgtgtgtttccaatacaagctgctgcctgtataagatcatggagaaccattccatctcctatattctgatcgtatggggaaaagcagaaagtactgctaccatcggagagctggctgtatgccaggtacagagtctcctggctgcctatgcagagaaaagcgacaagaatacctttatgcagaatcttctccttggtagttattctgatgtagatgcctttaactgcgccaagaaactgcacattgcaacttctgttcagcgtgccgtatttcttgtggaaaccaaacagaccaaggatgagaacgctctcgctacgatccggaatattttctctgcccgtaccagagatttcatcacagctattgatgatacagggattatcatcatcagagaattacagtctacagaaacttatgaggatctggaatcaattgcatatatgcttgtagatatgttaaatacagaagcaatgacttccgcatgggttgcctacagtaatctggcagaggatatttccaggcttccagacgcatacaaggaagcacatacagcccttgaagtaggcaagattttctacgcagataaaaatgtattcggatataaccagcttggaatcggcagactgatctaccagcttcctgtttccatatgtgaaatgtttatcgacgagatcttcaaagaggaaactctggattctattgacgaagaaaccctgatcaccatccgtaccttctttgaaaataacctgaatctctccgagacctccagacagctttatgtacacagaaatactctggtgtaccgtttcgaaaaactccagagaaaattcggactggatatccgcgcgtttgaagatgcactgacatttaaactggcgatgatggttgtggactacataaaatattctaagaatcatccgtcatagatttctcagacaatttgataacatccatctgcgttatcaaaccggcagactcttacagctacgtgcctacgcgattctacaccgaataactgctccgcagggacttacttgattcggttaaaaaagcgttatatcttcaccagaaatctctgttgaaaatacaacgctttttattatttcttatatattctatttcgcttctttcagcagcatcagatgctcttccggaaaatggatatatttcggaacttttgcatgcggatcttcctcaaaatttcctttggggcacatccaccaaaccggctgacagtctccgcctttcttgttcttcagtaaatactgatgttcaaaggtcgtttcaatatattccataacttccacttccatgtggttctctccgccttcagatgcacctttcatccagtgaccgcggattcccacatgcgtaacatcatccggcaccacatctttggtctgcagcatcaaatcccagtccactgcataaatactgtgttttcccattttctgtacagttgagaaatttttacaccctgtcagtctggctgcctgcagaataccgggtcgttcaaagagtttcttagtttctcctgtagtaagtgcctgaccgctgtccagaattgtcagatgtccgcagaacttgtaagcctcatcacggctgtgagtgaccagaatcatatcacctgtgtactcattaagaaagttctgcatatcacgctgcatgatatctttcagatatccatccagtgctgagaacggttcatccagaaggatgacttccggttctccgatcatcattcgtgccagtgcgacacgctgctgctgacctccggaaagctggcccggataacgcttctccagcccgttaagctgataacgctctatgtaatctgccacttttgccttaagttgtttcttatcccctctgtatccgcatgcgatattcttctctacagtcatggtaggaaaaagtgcatagttctgaaaaagatagccaaccttcctctcctgcggtttcagattgatcttcttttctgaatcgaaaagaactttatcatttacaacaattcttcctgagtccggtgtctggattcctgcaatacagcgcagagtcatactttttccgcttccggatgctccaaggatccccattggagaaccatcactctccagctttactttcagagtgaagccatgaagtttcttctcaatatccacactgactgccattacatccacctgcccatcttcattcccttaccggaaacgatattgatcgccgcaacgatcacaaatgaaatgatcaagatcacaactacccagaaaccggccatgccataatttcctgccgcagtctccgaagcaatggcaacggaaacggttctggtcttgccaagaatgtttcctgcgagcatggatgtagcaccgtattctccgattgctctggcaaaggcaaggactgtaccggatgcgattccgggtcctgctgtcggcatgacaactgtccagaagattcttctgtcactcatgccaagtgtcttacctgctgcgatcagattcacatccacctgttcaaatgcagcgcgtgcatttcgatacatcagcggaaacgcaattacagatgctgcgattacgcagcccttccaggtctgtacgatcttaatatcaaaattatccagcagaaatgccccgaacggacgtctcagactgaacagcagaagcagaatgaaaccggccactgtcgggggaagtaccagaggcatggtcaggataccatccagtatgcctctggaaacaggtttcatcttcattaccagtctcgcaaagaatatccccagaaagaacgcgatcacagtagccgcgaaacctgttttcagtgaaatccataaaggactccagtttatttctgccagaaattcactcattcttatttagcttcctctgttgtctctgtctcagcatttgtttctgttgcttctgcatctttatcatctgtttcggaagcatcatctgctttgtatgctgtgaatccgtatttctcgaatactttcatagcgtcgtcagatttgatgtactcaaggaatgcttctgcagctgctgtatcatcttcagatgcctctttgtcttcgataaggcctaccggatagagaacaggtgtcttcagtgcatctgccggagcttctgcgataacgtctactttatctgcaacggaagctgcatctgtagcataaacgataccgatctcattacttccttcacttactgcagcaagaacttcagatacatttttaccttcattgatttccatcttatttacttcatctgtaattccaagattgtcgaaaatttctctggaatactgtccaacaggaacgctgtcacctgcaagtgcgatgttggctgcatctgtgatgttctcgaatcctgtaacttttgtttccccatccttaggtttgatcagaacgactttgttctcaaggatatcttctacagtatctttcttagccagattttcgtctatcagagcattcatctgtttatcagctgctgagaaaaagatatcacagcgtgcgccttcttcgatctgtgtctgtaatgtacctgagctgtctgcattgtagaggatttcaacatcaggatatgtctcattgaagtctttctggatttcttccattgcattgcttaagcttgctgcgatgaatgtgttgacttcaccttttaaatctgtatctgctgcgaaaactcctgtgctgaacattcctgcactcagtactcctgccatcattgctgcaattaatttctttctcatatttttaccgcctttcatttagtttcgttttgttttattcagttttgtttccttttgtatctattgtacaaaacttttgtattcttgtcaattttatttgtatatgttatcatgtaaatgataaaaggtcgaaagccttatttttaccggcaaaaacaactttccggcctttgatcgggtatcagataaatcgttactgttcactccgttctcagtaacgcagccaaaattcattccagattgcctgtggcaatggaattttggcttgtatgtctcgggattttggcatatccatgccaaaacacctcgcgggatagtggagtgtgaacagtaacgataaatctatagaaaaaaataataaacagtgaggtaattatcatgaaattaagtgcacgtaatcagttaaaagggaaagtagtaagtatcaataacggagctgtaaactccatcgtttctattgatatcggcggtggaaacattatcacagcaaccatctcctgtgcagcagttgaagaattaaacctgaaagtaggttctgatgcttatgcagtgatcaaggctactaatgtcatggtaggtattgatgaataaactttacacagctcaggaggtcgcagaccgtctgaagatcaaaaagacaacggtctatgaacttatcaagcgcggtgagctggaatcttccaaaatcggaaaacaactcagggtcagcgaagagcagttgacacagtatcttaacagaagcagttccggcaattccgaaagcgggcaggatattccatacacttctgttaattttgaacctgagagctctctgttgaagagagattatctgcttcattccagtggtatcattttaggcggccagacttctgccgccctggagcttcttctcggcaaaatgtccgctcatcctgatggccttcctgtcctgcagtctcatatgaatgactataacggactttattccctgtatttcgaaaaggcacatatcgctgctaccagtctggatatagatgatatccgtcacctggttcccggaatcccgctgatacttctttctttatataaatactctgtcggcttctatgtaccagccggaaatcctgaaaagatttcttctgtggaggacctgacggatccgaaagttgtttttatgaatcgtgaaaagggaagtgcccgcagggtttatctggaccgtctgttaaaagaacagggaatctcttctgaaaaaatcagcggatacagaaatgaagctgtctctgatatgtcatctgcatctgctgtttttgagcacagagcgaatgttgcttttggagaagaaatgatcgcacgttactttccgggacttgatttcgtccctgtgactgatatgcagatgtatctggcaattcctgcggaatctgtgagaaagccggggttctctgctcttgtggaaattgtacagtctgaagatttcaaaactgagattcatcatctgacaggttatgatacctcttataccggcgaaatgatctgcatataagaaacctgtaacataataaaaagccctgctgtccgggatatacgcttatgacgtacatgccgcttatacagcagggcttttcttatacattatttacaaccaagaagtgtttttccgataaagtatccaagcaccagaataccaagtgcgattctgtaccatccgaatgccttaaagtcatgtttctttatgtatcccatcaggaacttgatcgcgataatggaaactacaaatgccactaccattcccacgatcaggatcatcacctctgttcctgtgaaagaaaaaccgaatttcaggattttcagaagactggctccgaacatgaccgggattcccaggaaaaaggtaaattctgctgctactgtacgggaggttcctgcaagaatacctccgataatggtggaacctgaacgggatgtacccggaactacggagagtacctggaacagaccgatgatgaatgcagtcttaaatgacagattttccagatttgtacaggttggtcttcttctcttgttataattctcaatgacaatgaagaggataccatatacaatcagtgcaatggcaactactacatagttattaaatttctcttcaatgacatcattaaacggaagcgcgataacaatcgtcggtatacaggctactataattttaaaccagagtacccatttctctttatcacagaacttctccacaaaagtaagaattcctctggatactgcaccatgcctgttaagcactgcctgctgtttctttgaaattggtctgatataaaacggccacaatttgttccagtagagaactacaaccgcgaggatcgcgccaagctgaatcactacgaaaaacagattcttaaaatcctctgtcacattcagtttcaggaactcatccaccaggatcatatgtccggtactgctgatcgggagccattctgtgattccctctacgatcccaaggaaaatgacctttaacagttcaataaaatccataatctttcccttcctgttttcttttttgttgttattcttatttacaacgattttcaaccggatcagacaggtttctgccagataataagtaatgcaaaagacccacatatatctatctgactcactgtaaatactcatatgattatattacacaccatgccactgatacaactgtaatctgtatttttcctgctgattctataagataaaaacagccgccttttctccgacagagaaaattacggctgcttttcatcatttcatattatttatcagttctttatcttcttgcaatcgtagcaatatcaataagagataaattgttcaggtctgtattctcaaggctggttgccagtgcttctgctgtatccagagaagtaaggacattgacacctgtctcgatggcgttacgtctgatgacgaaaccatctttctgatgctctacaccctgtggtggagtatcgatgacaacgtcgatcttatgaccaaggataagatccataaggttcggtgcaggctgctccagcttatttgtacggataactttgattccgttttctttgaggacttttgcagttcccagtgtagcatagattctgtatccaagtgcttcgaatcttcttgcgatcgggatgatatcctgtttgtcttcgtctttaacagtgatgatcatgtttttatgtttcggaagacggatacctgctccgataaatgctttgtaaagcgcttcattgaatgtctcagcaataccaaggcactcacctgttgacttcatttccggtccaagactgatatcagcaccgcggatcttctcaaatgagaagacaggcatcttgatcgcatagtgttttgcttccggctgaagtcccggttcatagcccatgtctttcagcttgtatccaaggattaccttcgttgcaagaggaacgatcggaattcctgttaccttgctgatgtacggtacagtacggctggaacgaggattaacctcgatcacatatacatcatctccaagaacaatgaactggatgttgatcataccgataacatgcagtgctcttgcaagacgtctggtgtattctgcaattgtctcttttgctttctcgctgatggtcttagccgggtatacggaaatactgtcaccggagtggattccggcacgctcgatatgttccataataccaggaatcaggatatcctcgccatcgcatacagcatctacttcgatttccttacccatcaggtatttatcaacaaggatcgggtgctcctgtgcgatctggttgatcacaccgatatactcttctacgtcctcatcgcttacagcgattctcatgccctgaccaccaagtacataggaaggacgaaccagaacaggataacccagctcatttgctgctttcttagcttcctcagcagtaaatactgtctgtccctttggtctcgggatctcgcatttttcaagaatctcatcaaagagctcacggtcctctgctgcatctacgttctccgcagatgttccgagaatcttaacgcccatctttgtcagtgcttctgttaatttgatagctgtctgaccaccgaactgtacaactgctccgtccggtttctcgatatttactacattctcaacatcttccggtgtcaaaggctcgaaatacagtttatctgcaatatcaaagtctgtactaactgtttccgggttgttgttgatgatgatggtttcatagccttcttttgcaaatgcccatgtacagtgtacggaacagaagtcaaactcaataccctggccgatacggatcggaccggaaccaagtaccaggattttctttttatccggtgttgctactgcttcattctctgtgccttcatcgccgtatacagaatagtaatatggtgttgctgccgcaaactctgcagcacaggtatcaaccatcttgtatgctgctttgatctggtattcttcacgaagagctttgatttcttcttctgttttacctgtcagacgagcaatgatataatccggaaattccatgcgctttgcttccagaagaagctcttttgtaagctttctggttttaagtgcattttccattccaacaaggattgccagcttatcaatgaaccagatatcaatcttggtaatgtcatgaagcatggactgcggcataccgcggcggattgcttctgcgattttccagattctgcggtcatctacgatttccagttctgccagaagttcttcatctgtaagctgtgtaaaatcgtaggacataaggctgtctacatgctgttccagagaacgaattgctttcatcagagcgccttcaaagttatggcagatgctcataacctcaccggtagctttcatctgagtcgtaagggttctctttgcagtaataaatttgtcaaatggaagtctcggaatcttcactacgcagtagtcaagcattggctcgaaacttgcatatgtttttcctgtgatcgcattcgggatctcatccagtgtgtaacccagagcaatctttgctgcaacctttgcgatcgggtaacctgttgccttacttgcaagtgcagaggaacggcttacacgcgggtttacctcgattacacagtattcaaagctgtccggtttcagagcgtactgaacgttacatccacctgtgattccaagttctgtgatgatgttcagggctgaagtacggagcatctgatattctttatctcccagtgtctgagatggagcaactacgatagagtcacctgtgtggacaccaaccggatcaatgttctccatgttgcagactgtgatacagtttcctgcactgtcacgcattacttcatattcaatctctttccatcctgcgatgcagcgctctaccagaacttcacctacacgtgaaagacgaagaccattctctaggatttcacgaagttcatattcattatgagcgataccgccgccgcttccaccgagtgtgtaagcaggacggagaactaccggataaccaatgatgtttgtaaatgcaagaccatcttctactgttgtaacaaccttggatgctgcaatcggctcaccgatcttctccatggtatctttaaattcctgacggtcctccgctttcttgattgtctgggcagttgtaccgatcagtcttatattgtgttctttgaggaaacctttctcatccagctccatggcaaggtttaatcccgcctggccgcccagtgtaggaaggacgctgtccggtttctctttcaggataagctgttctactacttctactgtcagaggctcgatataaactctgtcagcgatatctttatctgtcatgatggttgcagggttggagttaagaagaacaacctcaatgccttcttctttcagggaacggcatgcctgtgttcctgcatagtcaaactctgctgcctggccgatgataatcgggccggaaccaattacaagtacttttttaatgtctttatttcttggcattatttatttcctcccatcatatccataaatctgtcaaacaggtaactggaatcctgcggtcccgggcatgcttcaggatggaactgtacagtaaagatattctttccttcgtatgccataccttcgtttgtgccgtcattgacgttaacgaatgcaggttttgcaatgtttttctcttcaagtccctcagcatctactacataaccatggttctgggaagaaatgtaaacacgtcctgttgcaaggtctttgaccggatgatttccgcctctgtgtccgtatttcatcttatgagtatctccacctgttgcaagagccataagctgatgtccaagacagattgcgaagatcggaacttcagaatcatataatttttttatttcctttataatagaagtacattcctttggatctccagggccgttacttaacataatgccatccggatttgtctccagaatctcttccgcaggtgtcagtgccggataaattgtaacctcacatcctctttcattcagggaacgtgcaatgtttctcttagctcccaggtcaagaagtgctactttcggaccgtcgccttttaaaatctctttctcgcggcatgttaccttctctactaccttacctgttgtatatgcttttaactgggggataattgtatctaaatcataattttcattgacggtgatcataccgttcatggtacctttctcacgaaggattttcgttaaggctctggtatcaattccggcaatacctggaatatcatgctttgttaagaaatgctgaatcgtgtccacgcttctgaaattacttgggacacgggataattcgcggacaataaagccgtccacccatggctttgatgactcctggtcatcataacaaattccgtaattcccaatgaggggataagtcatacatactgcctgtcctgcataggaagggtcggtcattacttccagataaccggtcatggaagtattaaagacgatttcgctgataacgtctctcgttgaaccaatgcttgtacctttgaacacatggccatcttctaatatcagaaatgctttcatacaatctccctttcttatctttatattgtgtctatcacttattttttcctaaatcttcaagattgtatcacagcaaagtgcttttttcaaccttataaggtactaaaaataattaagttgatattaaaaacttttttgtaatttcaggcagatccaatcacatgcattcactgctttctcacatccaaatacctctataaaatttaaatcatcctcttctctgtgcaactctacaccggataactgctccgcagtttatcagaagaagcttacacttctacgtaacaaattgtgcgttttgatgatactgtaaaaaaaattaaaaaaatttcaaaaaagctattgacttttatccatacatcggttattataaatgagcagtcgcgagagagcgattgataaataagaaatgcagaagtggcggaattggcagacgcgcaggcttcaggtgcctgtggtagcaatatcgtgtgggttcaagtcccatcttctgcattatttttttactcaaaaaaggaaactgatacagtttcctttttttctgttcttatgacacaaaagacatcagataacggtaaatcttccatgtggtttcattatcgtaatgagttccgtctgttgtcttatatccctgctttttcagataagaataaagatctgcatatttcgcaccggcaacttcttttttcattctggcattgaaatcttcgatttcctcatttgttacataaggatctttggttacctgtcccactgccacaatataggcatccgctccctgcgctttccattttggaatctcctcattcagcagactgatataatttgaaatattgtatacatcattaacaccaagccagacaaaaatatcttcatttcctttcatctgctcctgcaaggtcttcagggcagtatctctaagccatttataccccattccaacctcacatatccatgtgatgttatcgttctccacaacatctttcatcatatctgttctggaatctccgatcataatagtctttcgcattaccgcctctgccggatcactcagttcagaatatacaacatttccctgatttcgtacatatgcccgtattctgtaataataagtctttcctgaaacagcacctgtatctgcataactgaatgttgtattgccggaaactatattgattcttttatatcctctgtcctcggattctgaccggaatatctgatatccttctgcagttttgatttttttccatttgatcagggttccgctttcttctctcactcttatccgggtgatcacaggttttccgggagctgtttttatctccagtgctttcgatgatgggctgtacagagttttgtttccctgtttcagataagaacgtatcttataagtgtagagcttatcttcagaacctgtcagtgtaaaactggtaatgttcctgttcttgatcctttccacgcatttgtattttccgtaggctttataatacagaaaaatctgatagccggaggccttctttactttattccagttcagagtcactctgtttccggctgctgttccggacaataccggtgtttccggttttgcagatgctgcggatgccgatactgttccaaacagcattaccgctatcaaccaaaataaaaagaaactctttctgatatatttcacatgacattcctcccatctataacaattcatctatagcaataccggactgtccacagtattttacggaattgccataatcaaagagccggctctgtaaaagatatctgctctcacatcgccggcttgattttatactgttctcaattatttttgtattatttgactttcacgctcttcactgcgctgtaacctgtatatacctttgcagatcctaccatcttatatgcgcgtgctctgaaataataagttttaccacttgtcagttttgtcttatttgcggtcagctttgtagttccttttacaaccgtacccttctgggatttcttggatgatccacagtaaacatcatatccgtctgcacctgcaacagccttccagcttacggttgccacaccttttttggtggacttcacagagattgccggctttgtacctgttgctgtagctttcacttctgcggaatttgaccaggatctgaggttcttattggcatcttttacctgtacagttgctgtaactctgtatgtgtagactgttcctgtagaaatcacattatctgtgtaatcttctccgaactctgcgtcagccagatcaccattatcccatgttttaacagtttcatatgcaccgttgcctgttttcttctccagtttgtaagaagcatcatctgtactggaaccaacgtttaccacgatctgatcccatgttgcagatgtgatggatgcagttgccttcagcattttgaccttggatgaaacctttgcatcacagctgaactgctgaggtacggcaatccattccggtgtaaagtcaatagaaggtgtcttactcagtgagtttccgtcaaggtataaggaaactacctgagatccttccttgctgttttccagtttcagatttgtgatcttattgtttctaagatcaaggattccctgaaatccggcacagttaaatgaagtgatggcattattggaggcattgacttctgaaagactctttacataatcagtatctccgatgttcagtcctgcatttgcctgtgtggtaaatttattggagcttgcatctacgaaatccagattcttcagatatttcttggaaggcattactacctttgtcagtttattgcttccatacttcactacacgaagatttgtgcatttgctgagatccagagttcctgcaagactgttattactcagattcagatatgcaacttttgtattctttgtaatatttacagaagtaagtttgttatttgccgcaaacagatctgtcgcataggtaaaacgttcaatacctttcaggttggaaattccaagtcctgaaacatcaatcgtcttggctgctttgatctctgccgctgaaagtttcttatccttgtctgtatcaatattgtctaaaacatactggcggaactttgcatccgggaagttcgctgaactgactgctactgctgatgatgcttcagcagcatcggactgaaattcagatccgtcctctacctccggagcttcctcttctgctgagccaacagactgttcttctactgttgatgtatcatcactaaaatcagcagcctgaacgctgataccagaagtcatcatagctgcactgatcattcctgcgactaataactgatttaattttctgtttttcatctttccctctcctgttcgtaattttcataccttttgatacgatataaaattatcatattccatatcaatttgcaacatatttttaattatactgtaattatctggtaaatctgtaaaaataatttaccctgcagttacttacttctcttccattgtttctttttccactggtgtttcttccaccggctgttcctgtgctggttctgtttctgctgttttctctgtctctggttcttccggctgtaattcttctgccggtgtttcttccggctcattactcccatcttcatcttcatctgaagatacagtgtcattttccacattcttcgccggttccggagtcgggcatgacgttccgcaatacggacagaaacttacattaatatctacctcccgctcgcaggacgggcagattttctctcctttcaggttcgcagcattatccttatactccctgattttcagataatgctgatcaatctcctgacataaagcacttaactcactatcaattccatcaccctgagaatgtcgtctgtaaacaatatcaccgatatcaactttgattttctcaataatgcgctcttctcctgtgattttacttcttatcttctgtgcctcgatcgtctgctctgcgcgggcacctaattctcttgttgtctttcccagttccttcgttgtttttgaaaatgtcttaactaatccatcaaaaaaatctgttcccataatatttactcccttccattattgtcctcataatgcaagaacaaaactattttaattaatgactaccctccagcaggatcggctcctgtccgcgaagaaggatcttcggaccaccgtttccttctatgtattctcttgtgatcacaacctctcctatgctgtcatctttcggaatctcatacatgatatccagcatatactcttccagtatcgcgcgaagtgccctggcacctgtatctctctccagtgctttcgcagcaattgcatgaagcgccccgtcttcaaattccagtttcacttcatccagtgcaagaagtttctgatactgtttaagaatcgcattcttcggctcctgcaggatcttcacaagcatatcctcattcaatccgtccagagtaaagatgatcggaagtcgtccgataaattccggaatcattccaaaactgcggatatcctccactgttactttctgaagcagatgaggatcattatcatatttatccttcaggtctgcataaaaaccgatagatgcctgcttgttcagcctttctttaatgatattctccagatcaggaaaagcaccgccacagataaacagaatattacgtgtattaacagttacaagcggtaccattgcgtttttgctgtttgcacctacaggaacttccacctcacttccctcaagaagcttcagcattccctgctgcactgcctcaccactgacatctctctggttggtgttcttcttcttggcaatcttatcaatctcatcaatgaaaataataccatgctcggcacgctccacatcattatctgccgccgccagaagtttggaaacaacgctctctatatcatcgccaatataaccggcttctgtaagagaagtggcatctgcaattgcaagcggcacatccagaagtttcgccagggttttaaccagataggttttaccgcatccggttggtccgatcatcagcatattagatttctcaatttcaatctcatccattgtatctgttgccacacgtttatagtgattgtaaaccgctacagacattactttcttggctttctcctgaccgatcacatactggtcaagggtttctttgatcttatggggagcaggaatatttttcagatccagaaccggtttttcctgtttctttttctttttttctttctttggctgctgcaccggattctggaagctgcccagatcgatcatgctcacattcggcatattcaacaggtcagaataattgaacttaccctcattaaactgctgattcatagaattaaagctcttctgcatacaatccgtgcagacatgtatgttattgggaagttcgatcatcggaccggccttgctctcaggtctgcggcagagaaaacagaatttttcggatttgtttctctttttctctgtatcttcgctgctgtctattatttcatcatcattatagttctcgctcataatgactcctttctatatcctcttattcgtaacagtacagtgctcctgcaggatagcaggctgctggatcattacgcttatttaactgaattatatcatacaattcccttataacaaaatgaaagttttataaacacaaaaagaatcgttactgttgttactgttcacacatcactatcccgcgaggtgttttggcatgaatatgccaaaatcccgagacatacaagccaaaattccattgccgcaggcaatctggaatgaattttggctaagttacagtgaacggagtgaacagtaacttactgttcactgataatatataaaagacaccgccgcatgggcgatgtcttttgttttattcattgtccggtctggtgccgagagtcagctctatagtattttcttcatattccccattagtggctcttgcaataactgcctcaatcttctctcccgatttataatactgcagtttatccagcagatcatcaccatcactgactttctgtccgtcgaattttacgatgatgtcgcctttacagatacctgcctcctgtgccggagaatcatcctccacacttcttacaaaagcacctgtgggcatattatacatctcaattgcctctgtggtcagatttgcaagacttactcccagatatccttttttgctgctgtctactttctccctggtctcacgattcatcagttcttccagaataggctttgccttggaaataggaatggcatatcccataccttccacagcactgtctgcgtattttgcagaattgatgccgatcagctcgcctttcatattcaaaagtgcaccaccactgttacccggattgattgccgcatccgtctggatcagtcctgtactgttcgttccgtcatctgtagaaatcgtccggttcaatgcacttatccagcctgatgttacagactgaccatatccaagcgcattaccgatcgcaactacctgctgccctactgccagatcatccgaacttcctatctgagcaatcttgatctgatttaaagtgtcctcagggatatccgatttcttcaccgcaactactgccagatcattatcagcatctgtacccttaatcttggcactgaccgcatcctctacattcagatctccattatctcccgcattcacagtctctgtctctgcatttgccacatcatccccgataaagcagacactcagagttgtagctccatccaccacgtgattattcgttgcgatcagaagctcatcatcattatctccaacgataatccctgaacctgttgacgcactcttatattggtgggaactatatccgaaaaagcttggtatttcctgaacactgacagtagtgatcgcaactacagaaggcatggaagcctgagccactgctgctactgttccattctcagagtcagacagcaccttatcggcagtgctgtcatctgatgccgtttcctgaagatccacactgtctgtagttttaatctgcaccgaagacttacctgtattcaggaatctgtctgctgcaaaatttgccgcctgaaatacaactgccgccaccaggccaaagatcacagccagtgcgattgtcgcccctgcttttttctgaaaagaattctgatttcttctgtgtccagagggaccggatggtttcaaaacagttctctgttcttcatggaactgataatgttcatatctgggctgctgaccggaatcatctgttttttcacccaggtttctttcatcattcatgtaatctgctcccttctgttcctgtattactgtttatcggaacactccccgaaataaacaatgatctgtaactgttttatttctgcacagttacagcaattcttctcctgaactctggaatcagtatatcaattaattgtgttcaaaatgtgacaattatcgtaaattggcgtgtcttaaggtcatcctcttacctttattttctgttccagtaatatggactcatggtacatgcaagaacaactttccggggaagttttctgtatcttttccccagaaaatatcctgcatatttcattccgctctgccagatcagctgaggaatcagccagaagtgtcccgtccttatcagatagcccaggcttctttttaccagacggattccctccccctcagaaggtactccttcaaaaatttccggatgctctgcctgggatactcccagatcgaagtttctgtgaaactgctgccttccggaataattatgggaatgatacactctcgcatctgccgcatagacaactgaatagcctttctgaatcattgttccggcacagatcatatcttcattgaaaatcgcccgctctgtaaaaccgcctgttttcagataaatccctttatcataggccgcacacacattagaacagaaataggtcttgatcccgtacttatcaatatcagccagcgactttaccgaggactgctccggataattaaaagaacgggtataacgttccagaaagcgacagtctgccctgggtaattgtcttgcataggctgctcctgcacccggattttcactgacagcacagacaagatttccaattacttttctgtcagcagggagagcatcctgtgtcataaagatcataatatctgcattcgaaagttctgctgcccttcttctggttccgccatgatcaaaatccttctgttccaggtgatgaacctcaaggatcggacatttctcccattctctgttccagtactgctctcccgtattcataaccagaatcctgcgaggacggtattcctgttcttccagcctgtgcagcagttctccaaattctctgccgggacgataggcaggaatgattacatcaactgtcgcagtgtcattatatttttccttatgcgtcatcctcaacactccttatctgaaaagaggaccatcctttccaacagatggtcctcttttctattatttatatttttatagcagttccctcttactgttcttcagaacttgctccagaatcatcgctgaatccatcgtcgccgccggtctcatctccaccggtgtcatcgccgccgtcgtagtctccaccaccagtgtcactgccggtgtcatcgccgccattatcataactgccgtcatcaccactgttatcataatcgccaccgccgccataatctccgccgccattatcataacctccatcataaccaccgttatcataatcattgtcataatcataatcgccgctgttatccgtactgccggaggtattatcgccggaccatacaaaagtgtcatttgcatttgtggtatcagtgtcctgtgtcgtagtcttggctgcatcatccagcttactttctccgccgacgatctcaagtatcttattactgcgggccactacctcagaagacggagtataatcctgatcatcatacaggaacttgtgaagttcaactacattgttctcaagatcagtaggaacaataatacttcccttgatattggagaatttaaacttctgcgggaatcccgtactgtctgtaaatttatatccgatcagagtcggaataagtcccagaatatcctgctttgaaagagatgttgtaaccatcgggaatacatcatccataatcttaaagatagaagaaagacctgctatcttcgccttatcaaagagcattccaagtactcgtctctgacgctctgtacgtcccatatccagacttgcagtataacggatacggcaataggatgtcgcctgtacgccgttcagatgataagttcctacaattgcttcctgatcttccggctttggctccggtttctcgagcggagtgtagtcttttcctgtcagcttggatgtttccacgcaatagttattcatatgttcaatttccgcataagataacggaatatcaagaccgccaagatcatctatcacttctacaagtgcggaaaaatcagccgtcgcataatcggaaatatccagatccaggtttgtatttaacatggtgatcgcctgttccggaccacccagcgcataggctgcatttgccttcgtataggtatcatctccaacattgagaagtgtatctctgtatacggaaaccatacgcacttcttttgtatcgttgtttacactcacaatgatcatggtatcactgttctgtgcagaatactgggagccttcccctctggtatcaataccaaacagcacataggtcttgtatcctgtcatctttggtgcttcctggtttacgactattttttcctttttcagttccggctgctcgatcttatccagcctggaagaaatctgtccatacacatacagcccgccaataaacagcagcagtacaatgatctcaagcacaaacagtacttttttcttttttcctggtttagccatgactttttccccttatcttaatatgcatttttgtttataaatcccttgaaaaatgtaaggaatataatcttgatatccagccctatgctccagttttcaatgtaataaaggtcatattcgattctttttcttatggatgtgtctccgcggtaaccattcacctgagcccagccggtaagtcccgggcgaacctgatgtttcaccatatatctcgggatttcttctctgaatttctctacaaaaaacggccgctccggtcgtggtcccacaaggctcatgttacccttcagtatgttgaaaagctgtggcagttcatcaatactggtgtgacgcataaactttccgatgggtgttactcttgggtcattctttactgtccatgccttcttctcttccaattccggctgtacttccatggaacggaacttatacatccgaaaagtctggttatgaagtccaaccctctcctgtttatagatcagtggtcccggtgatgtcagcttaatgatagcacacattaacagcatcagcggtgaagttactatgattccaacaatagatcctgcaatgtccatcgcccgcttgaccagtgcattgaatgtattgttcaacggtacataacggatattgataaccggaagtcccagtatatcttctgtgtatggttttgtcggaatgatcttattataatccgggataaatttggtgtgtactccggatttttcacacagtgctacaatctcttccaggcggtaatattcacttaagcccagagtgatcgctatttcatccagccggttctccggaagtattatattcagattggcaatccttccaagaactttgattcccttgtactctgttcctgccggaacattgtcatccagtattccgcggatcacatatccccactgaggattggcaagaactctgtcaatatattcctctgctgcgcggctgtatcccacacagatcatctgtttctgattcagtcccttctctctcatatctctcagaagagcgaaaatcaacattcgggcacaccactgaagcacaatattgattacataaaacataatataagtagaacgggaaaaatcgctctcatctatcatgtaaaatgtaaacatcagaataaggagcccaagcgagttggcctttacaatattagccaatacaagccgacgcccctgcatccgcatgggagtatacaatgtgaaagcctgatacaacaacagataaaccggtacaataaaaaccagcatcagcatatactgctggaagcttctggttctgactgctgttgctgccataggaccaacaaaacggatcagccatgccagaaaatatgacagtaccagtacaattgcatcaatgatcatatggagacgactgaaattcttttcattgtcctttagcaatcttttgtcacctcatttttttatcgtttctatattataatagttgttttataaaagcaataaaaatttatctttctttcttatcatccgcacaaacgcctgaagatattcacccacaattcaacttgaatcctaaaatagtttgacagattttgaaatttaaaaggtattttatgattttttttactgatctggaatccattcttaattcccgcaatatactctcttccgaatcctttcagcgcaaaaaacagaattttgattccaaatcctgcaacaagaaacggaagattgataataatctgtaacaccggcatatttttgtatatcagataaatattatttctggaagaataccggattttgaactgattatatctggatccgctggtaccgcttcccacatggtataccatggcatcaggtgcataccagttttcatatccatagatcctggcccggtatcccacgtccatatcctccagatatgcaaaatgttcttcgtcaaaatatcccagctcatcaaagatcttctttctgtaaatagcagctcctgcgcaggaagcaaaaatcttctcttccttttcataggtatggatatctttccccttacctctcgcataagcccatccaagcgcgcagtaatagtttcctgcatcatccagcctgtccctgtcatgaaactgaatcattctggcagcacaggaaaaagctttgggatgccttttgatggctgacagcatttcttctataaaattctccgttacttcaatgtcattgtttaaaagcagtacataaggtgagcgtgatgctctgatcccttcattgaccgctttacagaatccgaaattctccggcagttcgatcagatggacccatggataccttgcagcaacaaaagcacagcttccgtcattggatccattatccacaagaattacatcaaaattgcttacagtctgacactccagacctgcaagtacgccatccagataagccatcccattaaaattcggaatgatcactgatacttcctgcatgatttcctccctgtcttctcttttttctgtcctgcttctgtctccattcccgggattggcttcagagaataattccatttggtaagagacaggtttttgttataacagggatctccgtttttgagaatgtctatccagtgacatcgcatatattcaatctccgtctgaaaacggcgcactttctccttgctgtcctcagctcctctggtctttgattccatatgataaagcttcgcatagggatcatatacgatcagatagccgttttgtcttactttcaggcaaagatccacatcattaaatgccacagccagttcttctgtaaatcctcctgcctgctcaaaaacctctttcttcatcaacagacaggcagcagtcactgcactcatatcctgaagaagggatgccttatgcagatagccggtacggtccgcaggcatatctacgaacatatgccccgcaataccgcccattccgatcacacatcctgcatgctggatcgtattatccggataaatgagctttgctccgacaccgcccacttccggacgctgacacactccaagcatttcttccagccagtccggattgatggattttacatcattattcaggaaaagcagatattctccctttgcatgcgccgcagcaaagttattgatggcagaataattaaattcttttccccatctcaaaagatggatcttccggtttctggaaagctctttataatatcggaaaatctcatcagtggtactgttattctccacgattatgatttcaaaattctgataaccggtattcttctccagcatttccagacaggtctgaagagtctctttctcgtctttgtttggtatgataacagacaccagaggttttccctgcaccggatatttcacccggtaaaagcccagatcctgtgtatggcttacctcgccttttgtacctattctctcaagatgagcttctattgctctcttgccggcttcaaatgcgtacattttactggcaggattatctgcagtggaggctttgtgtgttctccagtgatacaggatttccggaacatgtaaaacctctccggcattctccgtacagcggaagataaaatcgtaatcctgagctccgtcgaattcttttcggaaacctccggccttttctacaatactctttcgcactacaaaaaagtggcagatataattattggaacgcaggagatccagattaaaatccggtttcagatgtggctgaaaatgctcgtccagttctgttgtaaccttatcctcgtctgtataaagcgcatctgcctgcggatgatcctgcagtattttcacgatctcatataatgcattgggtgccagcaggtcatcatggtcaagaagccccacaaattcaccttttgtcattgcaaacgcgcggtttgtgttctctgcaatgccaaggttctctttgagattgcagaatcttacccgggaatctccggctgaatattctgccagtactttctgcatctcctcattgtcaggacttgcatttacgatacacagctcccagtttgaataagtctgaacgatcagtgattctatcatctgtctcaaaaattctacaggtgtctgataagccggaactgcaatgctgatcagcggtgaataatcaaatttctgtttcctctgtgtttccagtgtttcctccgtcgaaatgtaagcccggtaccatggaccatatggtacttcttccggttcaaaacgttcatgcagcctgatccagaattcctttggtccataatgcttcatgtagcggaaccctttccggatcgtatagggggaaagcttcctgaacattttcgtccactggatttttcctcctgcagatggttttttactcatatgataacctcggtttttactatgattttttattttaacaccactttacaactttttagttttaaaacagaaacattgtgttttattgaataaaaaaatgccgtacaggtctttccgatgtataatgagtttgagcaaaaaaacactatgaaaggaaagtgaccctgtacgacaaactcattatacaacaaaagcaaactgatttccagactaaatgaatatttttcaatttattttcagcgctactctgcaccaactgctcagaccttatttctgtttgtgctttctatgctggcgcttgaagcggctcattctatccgcttcctatatcgacattttctggctggtatcacggaaaaatcactgaatgctttctattatgcctgctcctatgcaaaaatagactgttccgccttcatgaatacaacagctcgcattgcacttaaactggttccctcgtttctggattcctatccggtattcttatgcgtggatgacaccatggttccaaaggtcggtaagaagtttgaacaggtgtccatcctttttgatcacgctgctcataatggaaattcctacctgaatggacattgttttgtcagtgtaatgctgtgtgttccgtatgctgacaagaaagatggagcgattcattatatcagtattccgctcgggtaccgcatgtggaagaaaaaagagtccaaactggaactggcagcatccatgatccgtcaggtaatgccggaattcattcaaaagaggcaggtcattattctatgtgacagctggtatatgaagaagccatttacagggttggtggatgaatataaaaatctggatctaatcggaaatgtccgaagtgattctgttttatatgatctgccgccagcaccaactgggaaaagaggtcgtcctgccacacatggaaagcgtctttcaattgacagcgattttacgttttcggatgaaaaagtaaatggctattacataggaaagcgcaaagtacgtaccactgtttttggaaaacgtaccgttacagcgtacgtcacttctaccgaaaaggagaaaggaacacgtcggctgtttcttagtacggtctcggaggagtctgtgtcaattccgaaagaaaacctgccggattcgattgaaaagcattttgacttgcttccaatgtttctgtatcagattcgttggaatatcgaaatcggatactatgagcagaaaacgttctggtctctttgccattacatggtaagaagcagcaaagggattgagatgatggtgaatctgatcaatatcagttacagtgcgatgaagattcttccgtataaatacactgaattttctgaatatcagaatcagagcgttcaggactttcgctttgcactcggaaagcggattcgagaagatgtatttgtttggactttcgagaaaaaactcgaaaaggctgaaaaatcggaagagttactaaaggcattggattcattgattttcaatcagaaacatcaatcacaaaacttgtaaagtggtgttattttaacattgtatgatattttttgcaagaaaggagagaaatgtgttatactgttattgtttttatgttatcgtttttatgtaactgttcacatacaatgaacagttacttttcaacatttttatgcacaggagtattatataccatgatgataaagaaaaaaagaatcactgcagccctgctggctctgggacttggtgctgtcaccatgttttcacagtttccggtatctgctgctgaagaaacagcccagaatacagacgccgccgcacagacagcagatccgtctgtcgtagtcaccaacggtatcgacggatggccccaggcttccgatatttcgtctgccgcagcaattgtaatggaaacttccactaacacagtcctgtattccaaaaatgcagatcagcccctttaccctgcaagcgcagtcaagatcatgacctgcctggttgctcttgagaacagcagtctggatgaacaggtaaccatgactgcaaccggtgtttccggtgttactgacggaggagccaatatttcctcacagttagatgaggttttcaccatggaacaatgtttatatgccatcatggttgcctctgccaatgatatcgcactgcaggtagctgaacatgtgggaggttctgtggatgcttttgtacagataatgaatacccgggcacaggaacttggctgcaccaatactgtctttaccaatcctaccggtcttcctgatgagaaccagcatatcaccgcccatgatatggctctgatcatggaagcagctatggcaaatgacactttccgcaccattgcagcaactacttcctatacacttccggcaacaaatgtttccggcggtgaacgtgtactcacaaacaattttaccatgataaacagcaccagcgacggttattataaaccctgtatcggcggtaaggaagggtacacagaagcttccggaagtaccttggtatgtgaagcttccaaaaataacatgaagctggtatgcattgtattaaatggcgcatccggtgttaccgataatgaagcgatcgcacttctcaattatggttttgacaattttgcaccccttaccatcgcagacgatgattttaaccgtctttccggtggtacagtcattgcaccaaacggtgccacagaagataatctgaccacagaagatacttcttctgacggacagatcacacgccagtattactttggaggaactcctgtaggaactgctattctggaagacgcagagcagcagacaaatgatgccgcagtaaccggtcagaagaatatggaggcagcacaggcatattctgcttcccatacaactgctccttattatatcatcggggcgatcggggcagcattcctgctgtttttcctgttcctgatggtcaaagtgatcaaatcctgaaacctacttctgaataccagacagtaaccatttctttgatagataaaatagataaatttaagggacttccgcaaaagcttttcatgcggcagtccctttatttcttttaaggcaagattaaaaatgcccagcaggcaaatggcgaaatcaccagcagtacagtcagtactctgtatatcagactccgcaacttttcatttttcactgtttttgtcagaatattattccagcccagcgtaacaaagtacatcagaggatataatgcaggcataagatatcttccctgtggctgattatcactgtaataaacataatacagaaacagaaataccggaatcataatcagaaataccatcatcaaatggaaaataccttctttattccactctcgggatatcacctttgttttaatcttccatctgtcatttccaactgctttccgctgtgcaacatacattttttttctcagatcaaatgtctcttttacaaaaaatacactgatgatcccaacagcaaagaacagcatatacagtttgctgaccgtatatggcatataaatttccatctgcccaaaagtaccgatgaaacttacacacactgtcagaatccagttatgataccagcccggatcctgataaaggataatatctttccagttccatcccagctttgcaggcgtcggatacagtgaaggtctgtaatccttctgagcatatttttccgcacattccgcacaggatttccttcccaggaaatctccgttatacaaaactgcgttacggatgaaccaccagccgcagagaactaaagtaactgctgcgatcactgctcctctgctgaaaaggaaacgaactctctgtgaaaaagcttcttctctgcagagtaataccgtaaaacagaagaagaaaaaactgcagagtatccaaccgtatgcattataataagacaatgcacatacggccattcccactgcaaggagtatacagtttttccatgtccagtcttctctcagataagaggcccatgcatacaggatcatggctgctgccagcagtgccagtgagtctgtattcacataagttcccacaaagattgcctgcggcataaatcctgccagtgctgcaaacagccatctaacttctctggaatatttttctttcggaaacagtttgcccgaagcttttacaacaaaatatactgcacctgtgacaaacagtacatctgccatacgtgcaattttgaacatggagtatcccggatctgcaaaaagccgggatattctcataaataatgcagacaccatataagatacaaccggataatatgcataggaaattccccacactttattcctgacagccggatcatctccccccggaagagctccatggtgtttataaatgtaatctgcaacataatatctcatctgttcatccggccctgaattaaaaggctgtgtcatcgcccaggttgtcagcaggataaacgccagaaatacaaaaatgaaaatttctgttttttcattgatctctttctttttctttaacatatcttctttcacattcattttatagcgatttcatcttcagattcttttcagagaaaagtcctggctcttcagagtgagattggggttataataaggatctccgttcttcaggatctccggccattttttctcaaaggtggcaatttctttattaaatcgtgccactttttccggagtatcctcaagacctctggatttggattcataatggtataattccgcatatggattatacacgatcagatatcccgcctttctcagcttcatgcagaaatcaatatcattaaatgcaacagccagttcctctgaaagtcctcccactgcatcaaatgcagatttcttcaccatcatgcaggcagctgtaaccgcactgtaatcctgtgcacagataattctgtgacaatatccggtggtacctctcttctgctggacaaaacagtgtcctgcaattccgccaaaaccaatcacaacacctgcatgctggatcgtatcatcctcataataaagtcttgcacccactgcgcctacatctttacgcatgcaataacccaggagttcttccagacagtccggattaatgatctctgtatcattgttaagcagaagcagatactcaccctttgcaaaagatgcaccatagttattaatggcagaatagttaaaaactccgtcccagtataccatgcgaaccttcggattctctgcctccagttttttgtaatattcaaaagtagcagaatctgtactgttattctctacaataatgtactcataatttttgtacgtagatttctgttcaatggattccatacatctcttcagatcatcaatatggtctttattcggaataataatagaaatcagcggatcatgatctctgataaacttcgttctgtacagccccagatattcacccttaaaaacctctgcgtggattcctgttctctcatagtgagcctgtactgcacgtcttccggcttcaaaggcataaagcttgctctcgggattctctgctgtggagtcctcatggcaacgccagtgatacaggatttttggaatatgacagatttcttcatcctttactgcttccacacagcgtaacacaaaatcataatcctgtgcaccgtcaaactcacttcgcagcccgccaactttttcaattacttttcgtgataccacaaacagatggcagatataattgaccgtacacagcaaatccggattatagtccggtttaaaatgcggctgaaagaatttatgtccatccatagacatcttatcttcatctgtgtagatcaccagtgtctgcggtttctcatttattgctttcacacattcaaataatgcattcggcgtcagctcatcatcatggtctgcaaaggcaatgaaatcacctgttgcaatttcaatggcactgttggtattctctgaaatctgaagcggctcctcatgagaaacatatttaattctgttatccttcgctgtcagttcttttaacaattccgtcagcggtgactgtgcgccgcttccgtcagagaaacaaagttcccagtttgaataagtctgttcctgaaatgattctgtcagtcttctgagatatttctccggtgtcttatacagcggtactacaaaagaaatcttgggtctgtatccaaaggatgtttttttctgtttctccagttcgttcctgtccggcagatgatgtctgatccatttctgataagatggcggtccctgacgtacatttttaacctttgtcactaccttctcagcaagagccgccgcaccctgagatttccagtagcggattcctttttctacatatttgtctaatttccttgccagaatatcagcttttctcagaggaaccacatgtacagttttcttctcgcctgcataaaacactacatacaggcattttcccgaaacgttggtgatctcagagaagaatcctgtctttcccggatcctgtgcttcttcaaacagctggttgacatccaccctgtctgttctctggatttcagcggcaaccggctttttatccgcatcaaagatacggacagtcacaggcttgggtgcaatggcccaccctctgatccgtacagttccctgttctgcactctcttcttcaaaatatacctgcggtttatctctctttttatccagttcaccggcagtgatggaaaaccagacatgttttttatccggaaacttctcatagatcacaagcttatgatacccctccagattttccggtatctgaacagttgccgtaatctgtattccctgcattttctccggatctttaaaacgttccagtgcacttacattttcattttctttcacagacaccttcagtttatgctgatccagatatgcctccatcaccgcatctttcggccagtgtccctgcacaatatactgtgtcctgtctgataaatgaaatctttctcttactacttcaaatatttccttaggcatgttaatctccgttcttctcctgttttctcagagaacagtctgtgttgtttaatgtcagattgggattataataaggatctcctttcaggagctctctttcccattttctccggaaacagtttacttctctggaaaaacgcagctgtttctccggtgtatcttccattcctctggatttggattcataatgatacagttctgcatacggtgtaaatacaattttcactccatattttctcactttcatacagagatcaatatcattaaatgcaaccttcagctcctcgtcaaatcctccgactgctttaaaaacagaagtctttaccatcatgcaggcggcagtgactgcacttatctcctgcacacagcgcagacgtcccatatatccttccgcatcccgaggaagtttacataatacatgggcagcaactccaccaagaccaactaccactcctgcatgttgaatggtgtcatccggataatacagtttcgcaccggccattcccacgtctttttgctgacaaagctgaagcatttcttcaagccagttctctgtaatgatctccacatcattgttaagaaacagcagatattctccctgcgcctctcttactgcaaagttattgatcgcagaataattgaattcttttttccatgtaaggatccttacatttgggtatctgtttttcagtgtctcatagtatacaaaggtttctttttccacactgttgttctcaacaataatgatctcgtaattcttccatgttgtcttctcttctatggatgaaatacacagttccagatcattaatgtgatctttacttggaatgatcacagaaatcatcggttcgccggaaatagtcagatggcttctgtaccatcccttcttgtctgcaagttccgctgttgcaggaacctctgccctgcggtaatgctcctccagtgcttttctgcctgcttcccagtttttcttctcctgttcttctgtgatcaggttctctgctttcatggaatgacagaggatctttggaatatgcacaatattctctgcctgctcactgcatcttaagagcatatcataatcctgtgcaccatcatattccggatcaaactttccggcctgttccagaatttccttccggattgcccagaactgtccgatataattattttcccttaatctgaacagattgaaatccggcttgaattccggctcagaataatgttttccgtctgcggtgatctcatcttcatctgtatagatcatatccgcttttttctctgtgatcgctttgaccatctgaaaaagtgcatcaggttcaggtatgatctcctgaccggcaaacagaacatactctcccattgcaagtttcagagatgcattaagatttcccgaaatgccattattttccgtaaccttcttataggaaaggcgaatctcttttttatattttttccgcagaaactctcctgtttcctctccctcacatgcatctgcaagacacagctgccagttaccataggtctgttctgtataaacatcgatcacactttttaacctttgttcatctgtatccgtcaccaccatcacaatactgatcagcggtgaataagaaaaaacagcatttctctgtctttttaattcctttcggaatgcgacatgatctttcagccagtcttcataatcctgatctccgtccttaagctgggaatttctcacataacggataaatcttccaataccgtttttctttatatattcctgattcttctgcctgttcttcagagacagcagtttcatctgctgatacagtccggtattttcccgttttattttttttacatttacagtataaattttctgtacatcttttcccctgaaacagatgcagatattctgatcgtttgtattctccagattgacagtaatactgaatcccagatttcttttctcttcttcggaaatcccctttgcctcttccacgtccggacgtctttgtctggtgatcgtacattccagaaccttcccatctgtaccctgtacaaatatctcatccggctccagctggtttacaacccagcccctgactgtcaggatactctcctgtgtgatctgttcctcatcaatatgatattcaataagactttcctcacaaaagtccttcacttctgcagctgtggcttcccagatgatttctttttcatctcctgctctcagcgcaagctgcagtttctcatgttcttctgcaagttttataatttccggtatctttactgtgaatccgacatttcccacttcctttatatcttttgtttcttttaaatctttggcaacatccgctctttcacaacgcgaaggttcaggaacggagagttcctttcccgagccataaagaatgaaatcacattctgactgatctctggttatcgcccatccggtaatggccagagtatgatcttctttgtcactgtatatttttttatctacactccaaagtatatttcccataattaaacccttttgatggcacgatacactttccatgccttactgccttccacctgatcgaccagagctttcttctgcgcaagctcctgactcatctgctccattgcccttttctgctctgcgtatactttccagaatttcttttctgtggttttccggtccaggatctccatttcaatctttatggactttctgttctcaggaacagaatctactatgatctgcggatcgtcaccgccgaaatagaattctccggaggacacttcacagccatctgtgtgaaactttacctgactttcatcttcccatgtcagctttacaattttaagtcccttggacatttcgcccggatcaaggcgaagcattgtggtattctccggaagttcaaactccgtctgaattttcccgtttctgaacagatatctcacagaatcaggctcattaaagctctttccgttatcccagaaaatctgaagcatttccagagattcctgtttcttttctctgtaataatcttctacttccacccggcccggagagatctgggcatacatatttctcattgctgtatgctcacccagaatatactgctggaaattatgttccatctccacataaacttctatatcttcaggcaggattcctgctttctcatagaaatcccgttctttaagtattccccgtttgtcattcagttccagataataaaagatcatcctgtaaaccaggaactgtgaaggtacaggaaatgcaaaggtccactcatagtcgatcacagatactttattctcagagaggataatatttgcaggaacaaaatcaatattggatatttctgtacatttcagatcagaacgcaggtttacatttccaaatacccttacaaattccggtgttttctcaaagggtttcttctcatgaatattctttactttctgtatataagagaagaataatttctccagttcctctgttctgccttcttccagaagatgatccagcttatcttccagggtgatacctgtcagatattccagctgcgcacagtcacctttgatccggcagcggtttacttcaatttcctcttctttatacattccggtcagttcttcgcagatagttcccagattccgtacatgagctgccgctttcttctgcgacggtactttcttcacagtcagctgcccatctgctgcttcactgatttccgtataaatggagagcttctgatctctctcattggaaaacttcacataaaccggtgctgtctgtggctgttcttttccgatcacaagaagaaaggaattggcaaactgcgggtaaagatcattgctcaaaagtgtattatacacctgagattcctgaaacagatccagacggagtctgtcaaaattgtagtccctcatatgcagctctccgcttgcagggagatgtctgtctgaatgaatagtcattggaaatttgtaatccggatatggataataccagtcggcttttaagtttcctgcttcctccaaaattccattaaattcttttcttgaaaaagttttaactccttttgttttggggtatccctggattccttcgaataaagttccaaaatggtcctctgtacatccggcccagtatttcagtcccagtctgttctcaatggccagaatgatctttccatccggcttcagatgctttgatatgatcctgagaaagtccacatagggattctcactccggatataggattctccatactcaaatacaccgatcaaagtgatatagtcgtatttcttagtaaggtttttctcgatctcctgaaagtttcccacaaggatcttaagattatcctgatcctgatgtctgtatgcattgatcttacttcttttcatagaaagctcgatgcaggtaacttccttcgccctttcacagagagctcctgtcacagcaccacatccggaaccaatctccagaaccttctcttctcctgtaaagggaatccagctcagaatattctccctgatatgagaaaaatgataaagaattggccagctctttctctcactgatcactctgttaaattcttccggtgcaaaatctctggaaattgcaagcatttcatcctctatcgcaccatcactgtatagatcttttcccggatagcacgtggtatccagaattactttcccgattttttcttccatatatagtcctcgcgctgattattttttcgcactgatatttgtcatcataactttctcagacctgttcttcgcaccgtacttccacctttgaatccatatcatagaatccaactgtatttttactggaaataactgttatattacatgcgtcataaagtctgtggaataccgtaaaatctccgtttttataccctgtacatccaaatgacaggagatactcaccgccctgaaggttcatgttctgtgtaaatgttacagtacatatatccccttttcctgagtgttctatctttgcattttcatacatggtattggtacctgtgatttccgtaccctgaatatttttaaatgtgtatgccatgatcggctcctgaatctcttcattaaaccggactttcatacgaattttgaagcagcttcccttttcaacagtattggaacatcttcctttatcatcaatgactctgaaatctgtgatctcagcaatacggcttccatattccagcatattgggatttacctgaaaatctcccagtccttcactgtcctctgccacaatctgctctgtactgtcagattcattctgttttacaggattctgtcctaccagaagctgtttgtacaggtcaaccatctgctttggtgaaccttcatccatctttacgcctttgttcagaagaataactctgtcacaatacttggaaacgcttccaagatcatgacttacaaacaggatcgtcttgccctgtttcttaaattcctcaaacttgtgataacattttgcctgaaagaacacgtcgcctacagacaacgcctcatctaccaccaggatctccggatcaatattgatcgcaacagcaaaagccagacgcacgaacataccactggaataagtctttacaggctggtggataaagtctccaatgtccgcaaattccagaatatcattcagtctggcatcaatctcttcttttgaaaaaccgatcatggttccattcaggtatacattctcaagacctgaatattccatgttaaatccggctcccagttccagcagcgcggaaattcgtccgtctacctttacttcccctgctgtgggagtcaggacaccggtgatgatctttaagatcgtggatttaccggaaccgttggttccgataattcccacgcattctccttcataaatatcaaaatttacatcatgaagtgcataatgctctttataaagtttctttctggtaagccccagcgcttctttcagtctgtccgaaggcttatcatataatttatacattttggtgagatccttcacctgaattactttcttgttctccacgtgatttcctttctgttatgttcctgtgtttttcatcttcttctgacttatttcacgcttaccagtacagcgaaaattaagtttctgctatattaatattcgctgtactagttacagtacatctgcaaaatgaatgcgcagacgtttaaatacccagcttccgaacaggaaacacagaattgtaaatatccagaaatagaccgtccatcctgcatgttcccaaaaccaggttttcatcaggaatgtatctctgtatccggaaacaatataatacatcggattcagtttcaggatcttcatgatcacaggatgtcccatcagaggtgaagcctcaacgatccacatgatcggagtcagccagactcctacctgaagcacaatgttgatgatctgggtcagatctctgaaaaaaataacgattgcacttgtggcataggataagcccaataccagaatgaacacacatacactgtaataaataatctgcagataatagaaatcaggaaatttcccatacgctgcatacaggatgatcgtaaacaacacaaagaatgcatgcacaaacatagcagaaatgatcttgactaccggaagcacactgatattaaaaacgactttttttaccagataattgtattccagcagagaatttgtcccccctatcagcgcatcctggaaaaagaaccatggaacaatacctgctaccagataaagaacaaaaggaactcccagatcccctgttccggaacgaaaacctacagagaatacaaaccagtataccaggatcgtgatcacaggctggataaacgcccacacaattcccagataagaacctgcatatcttgttttgaaatcattctttgcaagctttgcaacaagccgtctgttcttataaatatccatcggtaaagaaaaaattgtattcaatcgctcattctcctatttacggtactctttaaagcttccccatttggtatctttgtcagaaaagcttaattccattccttccggaatcggccattcaactccgatatccggatcgttccagatcaggccgccctcatcatttggatgatagaaatcagagcatttgtaaacaaattccgcatgctcggaaagtacaagaaaaccatgtgcaaatcctttcggaatgaagaactgtttcttgttttcagcagaaagtacgactccaaaccattttccatatgtttctgagccttcacgaagatctaccgccacatcaaatacctcaccatttacaacacgtaccagtttatcctgtgggtaattgatctggaaatgaagtccgcgaagtacacccttatgtgagcttgactgattatcctgtacaaattcgacatcaattcctgcttctttgaaatcattgtaattgtaggtttccatgaaatatcctctggcatctccgaaaactgtaggttctaccacttttaatcccttaattccaccacattctgtaactttgatttttcccattttattttcctcttttctttagctttctctgtgtttctgttatatctgttcgcataaatccacatgatatgcagacttagccataatatcttttttccttttttgcaagtgcaatgctcagaatgataataagaagaagcattgccgctcctatgatcagaagtatttttcgcagttccggcatccccgcagaagttttttcttctccgacagtatctgctttctcattttgatccgcctgatccgtatttcctccggatgtatcagaaagggcatccactgcaggttccggtgtaggtgtagcttccggaacttcaacgcttcccaaaagataatcattataatagtaatcatctactgtatttccattctgtgaattctcctgaacagtcaggttatccacagtcactccgtttggaactgatacttctccaccatttacctgtgcttttgtgaaattttgataaccatagttgaacagtgctgtggaatccgtactggcaactgcaaggtctgccgccttcattgtcactgtaatataggtagttccattcttccctgctgctgtcacaagagtgtttccggcctcactggtatatcctgtcttgccgccaatacagccatcataatgataactgctctccggggcaagcatcggatgatgcgtatgcagtacccttggctcactgttcatgttcgtaggtttgatcgtataatctgtagcaccgatgatcctgcggaattttttattcttcagaccttcccgcatgatcaacgccatgtcatgtgcagtagaatagtgatcaggatccggaagaccactggcgtttacaaaatgtgtattcgtgcatccgatctgtgccgcacgttcattcatcatatctacaaagtgctgctctgtgccgcctacatgttctgcaatctgggctgcgacctcgtttgcagagcggatcacaagtgcataaaggcatgctctcatgctcatcacttctcccacctgcattccaatattgccggaatcccaactgatatcacgtgttcctgtttccgtaaagacaacatcttctttcagggaacagttctccaccgccagaagcagtgtcatgattttggtaatacttgccggataacggatttcatctccgcccttgctgtacagaagagttccgctgtctgcatccatcagtacccctgtctcagatgtgatctcaggacctgcaggccagcctgaaatctcattagttgaaatggatacgggtgtaacctctgaaacagcagcctgcgcagttccttccgcagcagtgcagatctgaacagcagtcattgcaatgactcccacagccataacaacctttaataaatatttccattttttcataatatttcctcttaatatatgtctctgttttccgtccgatgtaccgacaggttgattcctgaaacaaacttgcggcacacgattatcagaatccgtcaaaagaagctatggtatctgtgatatacttcacatcctccatatccagattataaaacatcggcagtctcaacagacgttcactttcctttgtagtataaacatcttcccctgaaaatcttccaaatttctgtcccgcaggtgcagaatgaagaggcacgtaatgaaatacgctgcagattcctttttcccgaaggtaagcaatcagccgggttcttacctgtatatcacgcaccttgatataatacatatgggcattgtggctgcattcctccggcacataaggctgttcgatcttaccttcctgtgcaagatgagccagatttttatgataataattgtatatctccattcttttggcaaaaatctgatctcttgcttccagctgtgcataaagatatgctgcattcagttcacttggaagataggaagaaccataatctatccagcggtacttgtcaacctgtccgcggaaaaacttacttctgtcagttcccttttctctcaggatctctgccttctccagatattcatccctgttaaaaaggattgcaccgccctctcccatagtatagttctttgtctcatggaaactgtaacacccaaaatctccaatggtaccaagagcttttcccttataacaggcatctactccctgcgcagcgtcttcaacaaccttcagattgtatttttttgcaatctccataatggtatccatctcacaggcaacccctgcatagtggaccgggacgatcacttttgttttctcagtcactgccgcctcgatcagtttctcatcaatattcattgtatccggtctgatatcaacaaatacaatctttgctccctttaacacaaaggcatctgcggttgaaacaaatgtataggacggcatgatcacctcatcaccgggcttaatgtcgcaaagatgggctgccatctccagagcatgggtacaggatgtggtaagcattacatgatttacatgaaatttatccatcatccaccgagaacatcttttcgtatattctccatccccacagagcattcctctctgtaccgcatcacgtatgtaatcaaattccctgcctgtaaaagcaggtctgttaaaatcaatcatctgttttcttttccttctcgtattccggtatcttatttctgtaggcaacttctcttccctccggatcccggatactcatctcactgaaaaatttctcagtctccatctccagctgcctgcggttttctgtttctatataatacaatgcaagatatggattcggcccatattctatcacatgttcgccttctttataaaaaatccagggttttacaacgcatttttcttttgcaagctcacaggctgccgtctgatctgcaatctgaagctgtcgtccctgaaaatacagtacagccccatattttaccggatgataaatatcatgacggtcaaacatctcctttatccggtctttttcataaagataatccagcagcagttcctctgtctgaaatccataaaccatatctgtcagctcatgttcatatccaaagaaacgtcctgcaatctcacatacctgaatgcccctgccaggtttccagaaaaactgcatggataatgcaccttccgtctgtccggtatagcggatataattctgcagaatatctgtggcacttttttcgacctccgccaggaaacgggatggataaacatttcgtgtgctgagcggaagcattccctcttccatttccgttttctcacgatctgcaatactgatcacattgactttcccatccattacccatgtcatcatgttaaactcataaccgtcattgtattcctcaaccagaatttcctgacagtccgtatattccgctgtctgcagggctttttttctgacttcatctgaatgatgaataataaagattcctcttgaaccatatttatccagaggtttactgatcagaggatactgcagatttgcaatactctgttgtatttcttcttctgatccctgtttcagcagttccacagatattttccgaaatcccggtgccggcagtccaagcttgtccagaacatcccggcatgccgatttatccctgtaccaggaaagctgttccggtttcagataacagggcagtcctgctttgtctgcaattttaaccatacactccaggagcagatctgaaaatgatgtgatgatcccgtccacaccttcttccctgcacatcagggcaatagcatctacatctgttacaggaatggtataagccttatctgcatacgttctggcaataccatctgcatatccgtcgcacacaacagtctcataacctttctcttttgctttctttaccagctctgtaaattctccgagcgttcccagaatcaacactttatgtttcatatccgttcctcacattctctgacaaccgaagccatatatttcatatcctccacgctgtaacgctgatcgcagggcaacggaagaatattggcagcccaggtatattccagactttttgtctcagagttctcaattatatttttccagtaagtcggcacaaatatcttcttttcggcaagatatctgcgaagtttcattccatcagcgtggaaatacggatatgcaaaaggtccctccggcacagtctgattaaatatactttccgatggaagcagttctccgagaatccggtagttttcttccctttttttctttgctctgtcataatccacagctttcagaagattctgtgtaagctttgacatctgccgaagctccatcccgtcatattttgccgcattttccagcatatctttgtagtaggttccggcattatgctcataacgccccagaatatgtttcatacgctctgcagaataatcgacagtcttattttctgtcaggctggtatctgttgacagatatgcgccatcgctgacaccccagaattttctgcaggaatacagtgtatctatcccttttaatggtttctgaaaaaatgcatgggtatggtccactatgatgtttccgtaaatctttttatactctgatatccgggaatcagacagctgaccatagtaattaaccagataaagatattccccttccggaagctgttctttcggatacagaacttccagtttctcattcagatgataaaattctgtctctatctgattttcctgacaggtatgcaccactgatccacacagaaaatacggtaataggattttcctgcacctgcggctcttcaaaagccacagcagtgcggttcttccaagattgaccctgtacaggtcaggataatattcctctcccggcatctcttccagctgaaaatatccgccaatttccttcattattcgtccgtatcctcccgacgtattacataatggggcattttttttgcctcattaagaatattcattaaatagattcccataattccgatcgataacaaaatcagtccaaaaaacgccagcataaccagcatcagcgaagtccagccctgcacagatatgcccagtgtaaaatatcttaccagataacagaccgacagaactacacttatcaggaaactgacaattccgatatttctcaccagcagaaggggaaatgcagtatgtgtcgtgatatcataaatcagatctttcagcagtctcttaaaggaataaccgctttttccgtaagctctgtctgcatgctgaaccggaacattaataatacggttagaactcctgatcagaaggtttccaatctgtggaagatatgtatttgtttttaccatggcatccacaaggaatctgcggatcagcctgtaactggtgatctgaagatccggatcttttcccagcatctttgaagttgcccatacagaaaatttcgttcccagtttgcgtatcggaccatgctttcttccttcatagcttgcaatgataacatccacatccggtctctcctgcatggttctgaccatcttcggaagttcctccggctgatgctgaaggtcatcatccattgttaccacaaactctccttttacatgtgcaaatccgcacagaagtgccggatgctgtccgaagttacgggccatctgtatgatccgtaccctgtgatccttttctctgagttccgtcatgatctcataagatctgtcctttgatccgtcatctaccaggatcagttcaaagtcttctttaagagtttcccggaatactttctccaaacgggtatatagttctcccagtgtatgttcagaattatatacaggaacaaccactgaatataagctcatatgcttttcctttctcttttcatctttttgcaatcatttttatcatatcattttcaacatttcttttcaagattcctgctgcacaaaccttgacttccctgcttttttatgtaaaatagttactgtccgacagctttcaggctagagcgtgtctgaaaaaggctttctgcaagatgtgcgtcacaatttgcgggaatgatttttcagacacgctctattggacaaaatccgtaaaataccattatcgcccggaggtattatgtcaaaactcaaagactacatacaacttcatctgaatatcctgctgttttcactgacaagtgttttttccaaagctgcatctgttcagtataataaacatggtctcagcagtcctctgctttacctgttcctgttcctgatggtagccaactgcggaatctacgccatcacctggcagcaggtcatcaagaaattctctttgtctactgcctatgccaataaaagtgtttatcttctgtggtcgcagatatgggcagtgctgatctttcatgaaaatctttccattcagaatatcataggtattctggtggttttatttggagtatggacggtgcagagatatgaatagaacatttattttaatcatgttgagcggaacatttttttccgctgtttcacagatacttctgaaacagagcgcaaatatcaaatacgaaaaccgaatcagggaatatctcaatttccgggtgattctctcatacaccatatatatgctgatcctcctcctcaatacatggtgttatacaaaagtagatatgcgctatggtcctgtcattgatactgccgcctatgtgtttgtcctgcttctctctcatttcattctgaaggaaaaaatcacgaaaggaaaaatcatgggaaacctgatcatcattgcaggtatcctgatctatacgctttaattacggcaatttcataaaaagatcccgaagctgttgcagaatttccatcagtgccacagctgcaggatctttttatatgtttcaatattttttaccgctttttatattgtctggtacacactccatttccatcaaacacagatacaatcctgttggaactggtcagtgtaatgttctcggcacgcgtaccggaaagtgcggaactgcctttgtaaaaatagtattttttaccattcagtgtcagccatcccttatacgcttttccgtttttccggaaataataggtgtgctccccacttttttccctgactttgtacattccattctcgcaacgtacaccgtcgcttccaaaatagtagatatcgccggtagatctggtcacgcggcggtttttaaacatatatccggattttgtatggaaccagtaacatttcccgtctactttcttcattcccatcagagcataaccatcagaactgatataataggtctttccatttacagttacccactgatctgacacacgttcgccattttcattgacataatagtattttccattttcctgatgaagtcctgtctgttcctggcttccatcattgctgcctgtatcgggtttcattgccggaacataggaatgcagagatttccatctcggcgtaattttctttgtatagtccacatagccaaaatccatatcaacatcattgcctgcaggaattcctgctaccagtccgctggtactattcagtccgctttcccggttaccgtctgtggactgccatattgtataattgtaccgttccttatcaggtgcctgaatcgtgtccccatatcttgcgatccatacatccactcctgataataaggaccagtctatgtaattatcataccagttggtattgcagtaaaccattggataatatccggccctgcgcacttcattgcagaaggtcagtgccatctctgagactgtttttgcagaaagcttacttgcttttgcatactccagatcatatacgaccggataggaaaccttgtaaccctgcattttgctgatggcaagctgtgcttcctttaatgcggtagttgtcgataaggctgtactgtacacataggtgcctgtgggtactccggcaagttctgcatttgtcatattctcatcataggtataatcttcgtgagtcaggccataggagatccggacaaacgcaaaatctatatcagacctctttacctgtttccagtcaatattgccctgccattcagagacatccatgcctctggttatcgcacccggaatgatttcaccacttccgttatagcagacaccgttgatctttttccatgctttggagttcactttttttcttgatgactctgtaccggaagttcttgcagaataaataaattcctcctcagccactgtatcacgtctgtcataatgcggatttgcaaaaacagagcttacaggctgcgctacagctatcgcagctgccagacaaccaacaataagcctttttctgatttttaaaaaatctcttttcatctttctactcctgtcttctaataaacgtccattttattacaatactattaacatattatacacactatattacattttcgcaagataatccctgatatatacccaaaaacggctgcacatttcttgctctgtgcagccgttttgcatatttcgtttctataagcaattatgtttatttatcctggcagaaatatccggatcagacagccggatctgtaggatcaaaattagcagctcctcttaacggagtcagtgctttctttccaagaggtcctttcattgcatcatctgctttatatttaccatcaataatactgatcggtgcgccattacagttctcataaacccacttcgcatctgccacacaggttctgatacatccatgtgatgcgggagatccaagcttattgtactctactgccggaagattatatgagtttgcctggccgcaggctacagaatgaacaaagattcctccctgtccggcaccgtctacatgagttccatactgtccccaggatggtcccataagaggctgccacctcaggcttctgctcagtgtaaagttaccggtcggagttggtgttcctgctaaacctacagataccctgatcgtcttaacaggaattgttctggctgaatcagcataaacagtcataactccgtttactctgtccacctgaacagaatacggtcctctgtatctgtttgtcagatcagtgatacggtatccgttacggtcaaagtaatacagaattccattaactctcatactcttatttcttgcaaatccgtttcctgacggatcgatatatctcaccaggtttttagcattacttacaattacccatcctcttgtatatttaccgtttgcatccagataaccgtttactccattctttttcataaactgatttgtctgaaccacacattctttaagataatagtaattgccgctgtattttctccatccgctcttatacaggcttcccttagaggatgcgatataccatttctttttatagcgcaccattgtgctcttatatactttacctttgtgttctgcggatgtagatgattcaaatatatatttctttccatcgatttctgtcaaaccgcttgcaagctttcctgatggtttaaaataataacctgcggaagtccacttatccgtataatgatttcccttggaatcaaaatacagccagccaaggaatttgccactggtgctgacaagtttctgccagccatgtttctcaacaacacgacccggagtacttccaaagtaatagtaatgatcgcctgcttttgcccatctctttgtccaggttgcccgctttccgtttgagccaaaataatatctgaaattgccgtattttacaagtttatttctataaatctggccgttactgtcggtacagtaatatgcaccattctgagccttcttcatcactgatttcagaacatatccattggcatccagcaagtaatctccggttcctttctccgggatagctgtggcaactacgccacgcttataatatttaccgatgtctgccggaatatttccctttttaaaatacagccagcgctctcccttagtggtatctgaacgaagccatccattgtggaacatttttccgggaatgtcgctgcttgcaggatcaaaataatacaggtttgattcgccgttaactgtgagggtgatctctcctgtctgtggcttaccttcagaatcaaggcagtaataatcctcattgatcttgaaatatccggtatatgtacctgctgcttttgctttcgcttcaagctgtgcaattgtctccagattaccattctcatcgtagtactggaaatatgttcctgtccatttccatacactcttctcctgctggcctactgtagatgtatatggagttatcgcttctccttcacatccggtataaacaacagcctcatctgcagttgtaaaataggactgatttgcctgggcttctgtttcttcccctgtggcatcttctcctgctgactgagctgcatctgatgtcggttcttcatcagctgaagatttttcttttacctcagcctgtccagttacaaggattccctcttcatcaaacagataatatcctgtatgggtttcccctttatactctgtgctgatctttacaattccgtctgccactgtataaaattcttcatttgttacagacactgtatccgttgctgctggtgtttccattgctgtaacctctgctgtcacagctgttgtatctgtttcagccactgctgtttcagatgattctgtctgatctcctgagaatccgtcagtctcagacagcatctcctcatcgggtagtgctgctgttgctgctttctgatcatctgtatttgctgtatcctgattttttgcaggtttgcgcagtttaaagccattctctgtgcttacccagtcctcagctttcactacagcggctccaacggcatccgtagcatctgctgttgacggcgtctcgtccggcaatgcagcagccgtatccgttcccgctgtaaatgcgtcgtctgtctgttcctgtgatggtactgctgtcccatcatctccatctgaaaaagcgtctgcttctgtttcagaagtttcttctgtaacatttacttcttctgcatctgtctgtgtggcaacagccggagctgtatcaggtgaagtaaatgcagcagcacctgcttcactgacagttgccattgtcataataagactcaatgtaaccgcaactaatcttcttttcacaataagttcctcctcttttattcatgttactttatggttactgttcactctgtttgtgcacagcagctttctactcgccaaggccgctatcaatagcagcaacaagatgatccagggcttcctgttcatcaacaccttcacaggtaagttctatctcatttccgcattttacgcatgcaccaagtacactcagtacactctttgcatttgccatgcccccatcgtagacaaatgttatctgtgactggtatttcattgcctcattgcacaaaatccccgcaggtctcagatgaagacctgtgggatttttaactgtcacttttttactgaccatttcactgttcctcttatattgttactaccccttctgtaagtggagaattcttttattccttgttttccttactgtcatcaacagcagtccctgatgaaatcactacttccgtagtcacatcttccactgtctcataaccatccggcaagactatctcaaccgggacttcataacttccttcttttttgccatccagatctatagatgccttaatgtctttgtcattattcagatcatccagatctttgttatctgatttgattctcacttctatctgcgcagtctcaaatgttacctgcagatctttcggtttattcttaacctctatattcttagtcggaaattcaaactctctgcttccggccggaagaatacttacagtcacccatacatcttcactggagtcactggtaagtttcacattgtccggcagaagattcgtaagactgatttttttctccacatcttcggattcaccggaaatatcaatactgtcttccggtatagtgatcacattattattatccgcaagactttcaagaccttctgcactgcctgctacactgatcgtatccggcactgttctcacagccccaacctgatatccttcagccggtgtccctacataatctgcagatatctgcactccctgacggattttccataattttgcagtcactgttacttttgcattattctcaatccgcaatgaattcatttcagaatcggtaagtacctcctgattcttatcaatgatcgtaaggtttacatcctgtgtaaaatcctctgtattcccatccagttcaatggaagcatttaccttatctattttattgatcagcgtcttcgggcctgtaatccttactttctccggactggcagtcagacttcctacttcataatctttgcccggtttcgtatcacctctgctgacatttaccacaaactcctgtgtctctttttcatcaagatttacactgagattctgaggagtaactttgatatcactgggagatacccccggtacagaacaggtaacggtaataggaaccataaccggatttgtatccaggcttaccgcctgctgaagatcagctaccgcagagatgtctgtgactttgatcttgtctctgatcttcttggttgcagtgatcgcaacttttatggaatcctggttctgttccggcatacacatcttaccgatggtatctgaagattccacatattccttgttgatcagttccacatcattgagcgtatagtaattggttcctgtcggattatctatgtttacaacgatcagccatagcacaacagctattgcgacagacatgattttcagaggtatattatctgttatttttcgcttcttcatgcttcactcttcctttcagtaaatggcgaagtttgctgttgtctacaacctgcttattctgcgctctgaccaggatttctctgagttttgcactgtttacacttctggtcagctttcctccctgcgctacagatacctgaccggtttcctctgatacaatgatcgtaacagaatctgtctgctcactgatccccacacctgccctgtgccgcgttccaagctgtttgctcagttccatattatcagacagtggaagatagcatgttgcagccacaatcctgttctctcttacaataacagctccgtcatgaagtggtgtgttatgttcaaatatattgatcagaagctgactggtaaggattgcatccagattaatacctgttcttatataatcggtcagcagctcattctgctcaattacgatcagtgctccggtcttaacttctcccatatcaaaacatgctttgaccagctcactgatggttttatccgtaaatctttccttcacctctttacctgcatcaaaaggtatcagtgaagccatgattcgcttttgtccaagctgttccagaacttttctgagctccggctgaaaaataacgatcacacctacgatcagtgtacttgccagatttgaaaaaatccacagaatcgtattcatcctgaaaatatacgcgatcagaatgaagaggagaacgaccagtattcctttcagaagtgtatatgcatgagtatatttgatccataccatgaactgatatacaaaaaaagcgatcagtgcaatctgtatgatatctataatcccaatcttaggaaatgccagtcttgataatgtttctatcaaatttcctgaaaaatcctgcatatggctctcctttccttatcatttttatatatcttatcgttgaaaatgttttcagtggattttgtgttactgttcactccgttcacagtaacgtagccaaaattcattccagattgcctgcggcaatggaattttggctcgtatgtctcatcgttaccggaaactgctttttacagattttttaatgattcttccagtttcttctcaaaatccacgctgtcaatatctttctttctctctacaggtgctgcagcctcatctgtcgtcactgctttctcatcaccatgaaaaataggattcgcataagaaacaacgttatcctgtgccggtctttcatcctttgcagaacttccgttaatcttctttatacttctttcagatgttgtgacacaggctttcggcactgcttttacataataataatattcatcatcctcatattccagtctctcggtacgggtatagtcaccaccaaatacaaagaattcaagaagtaatcctatcaccacagagatcactgtataaatgatcagcgtaacaacatcaatatccagtctaaaataaaatccacctgcaataatcatcagaacatacacaactccacctgcaataatggcaattctccatgcatagtcaaaagagcgggtacgtatcagattcaccagcagaatcactgcgataaaggcaatcactgtgatccacattccccagttctgcacgattccatctgtcagaagttttaatttgtcagctatggcaacatccgggttttccagaagtttatgctgtacacgtataaaacggataaaatagtaaataatcactccgcagcctgcaggaagtgcagaaaacgcattgcacaaaagtccgcttccgataggaagaagcgtcggaacactgaacccaaaggaaagcggtgtaaatacaagtactaaattattgtctgaactgaatctcaggaagagaattgccataaacaggatcagcacaagcataaaacctgcaacttctatccccagtgcataaccatgtgcgaccatcagggcaaatcctacaaaaatcattacacctgaaggaagaatggaacagatcagtgcaaggatcagaacaataaatatattatcgatctgcttcatatatcccatattggtattgatccatatgaaataaaccattgccagaacgaaacgtaagacaggcaggatataaatctcatactggctgtataaattctttattcgctgttttaattcgagtaatgctgtcattttttatatcctcctgtaactcctctggctgaagattttttatcttcgcgaccgtagattttacttaattgtgtaagttcttcataataatttttcacacttttctttgctttgtggtatttcaccgtatattggatatatgtcaggacagaaaacagtaccagcactgccacataccccagaataacttccacgcccagtgaaacaaggttcatcttatgaacattatctatcagatattcagcaaaatatgctgcgataccggccagaatcaggcaatacccaatcgtaacaaggaaaaaattcttaatcatggcaagtccgatataatcactacggtagtacctgctgaccggaagatatttctttccttccccctgttcatacatggcaagtttattcatgatttttatcttctcttcatttaacataaattactccttactgtatgcttttccttttgctataatccgctattactgttcactctgttctcagcaacaacctgatatcattcatataatcatacagattaattgtaacatatatcattatgtatgaaaagtgttttttcttatctcctgcctatgcaaaccgtaagaaaataaacatttccggcaccttttctcttcaggcatccggccattgcatcgatcgtacttcctgttgtatacacatcatctatcaccaggatattctttcccctgacatctccggtcacgcagaacgctttttccaggttttttcttctctgcaaagcattcagttttttctgcgactttgtctttaaaactttctgcacaatattgacatctgtggaaatcccggtataatgaccgagtttctccgccagatatgcagcctgattaaaacctctctgccgctccttcgacctgtgtaccggaaccggcacgatcagatccggcttccattcccgcaattctttctgtgcatatcgatacattgctctggcgtaaaaatcaccgtattctctgcatccatagtacttatatctggtaacagatcttctcattatgccatcataaacaaaaatacctcttccctgttcatacatatgcctgtgtttctgacagtctctgcagtattcccctgtttctatgggttttccacatttataacatctgggatgaccaatcggacgaagttctttctcgcattccggacagatcatccttcgctgatctgccagtattttctgacagaccggacagcatctcgggtaaaaaatatcagcaaccatgttcagaaaccgtttcatttccacttccttccactattttactctttgttttgctatcctctgtatttctgtttttttcatattatcggaataaattttttctctgttattattcagtcatcagatcacagtctgcaatatcattcttcaccatctgtattattatcccctgtagtctcactcagttctctgatccgttcatccagtgcactgtatctcttctgctgtttttcattgcgtatcatctctgcaaaggtctcctcttttcccacaaccgtcacacattttcttgctctggtaactgcggtataaagaaggttcctgtttaaaagcatctgtggtccggaaagcaatggaagtatgactgccggatactcagatccctgagacttgtggattgtaatagcatatgcaagttccagttcctccagctgtttgaacgagtacattgcaaaacgtccatcctcaaattccacttctgctgtctcagcaaattcattgatttccctgaggattccggtgtctccgttaaatactcccacgcctttctcaatgacaaccccatatcgtccccggatttcccattccatctgataattatttctgatctgcatgaccttgtcccctgtgcggaacagccggtctccaaccgccctctcggatttcccgtcttccggcggattcaggtatctctgcaggatctggttcagccgctctactcccagaagtccctttctcataggtgtcagtacctgtatctcaaagggtttggcatctacatagcgcggcagtttctcctggatcagcgcgatcactactcttataatgatatctgcatcatatctcttcagaaaaaagaaatctctgctcttattattgatctgaacctgttctcccttatttatcttatgagcatttacaacaatatcactctctgatgcctgtctgaatatcttagtcagttccactacatggaaacatctgcttcggataatatctctcagcacattgcccgggcctacactcggaagctgattctcatcccccacaaggatcagtctggttcctgctaccactgcaagaagaagagaatgcatcagatggatatccaccatagacatttcatcaataatgatcacatctgcctccagcggattctgcgcattcctctcgaatttagctgaatgcccgtccctctcttcttccggcattccattcagttccagcagacggtgaattgtctgcgcctcatatccggtagtctctgtcattctctttgcagcacgtccggtaggtgcagccagccgaatctctgcaccttctccctcaaaaaagcggatgatcgcattgatcgttgtcgttttacctgtaccggggcctcctgtaagaataaagagtccatgatccgctgcttcagtgattgctttcttctgcatttcatccagaacagttcctgtctctttctcgatcagctcaattctgtgcctgacaagctctttatcctcaggacacacaatattcagttcattaagcatcctggcagtgttcagttccagataataatactgtgccggataaacgatagtttctccgcttttttctttcagcaccagcttcctgtcaataaccatatccataagatgtttctccatataggattcatctactcccagaagtctggcacatcttgtaaataactgttccctcggaagataagtatgtccttctcccgaagcctgcagaagagtatacagcattccgctgcggattctgtaatctgagtctgcgtgaataccgactctggcagcaatctcatcagcaatcttaaatcccacaccggaaatatcttccgcaagtctgtaaggattctcctgaaggatcgtatagacagattccttatatttctgataaatctttgcgcccaggttcagggaaatcccatatttctgcagaaagatcattacttttcgcatctctgccttctcacttacctgcgcagcgatctcccgggcttttttctcactgatcccctttacctctgcaagccgctccggctcttcttctacgatacggagtgtgtcatctccaaacttccgcacgatcctggcagccagtgcagcaccgattcccctgatggcgcccgaacccagataacgttctattccatatgtatcctccggcatcttctctgtaaaagaactgatctgaaactgtttgccatataccggatgatggatatatactccggttgcttcaatagatgccccctgtgtgatcgcagggaaacttcccacgcaggtcagctcttcctctttttttgtacctttcagtaccataactgtatatccgttatcttcatttctgaaaataacatgatctatgtatcctgtgacagtttcactcatgtgcttttctccacacctcctgcttctttgagcctctgacaacgcaaaaaggcactgcactgtgcagtacctcctgctttatccgtcaaaacgtgccattacctctgcatacttaccggttcccactgcgaccacgctcattgcatcctgcacagtcagtgtacttaccccggttctctgctcgatcagtgtatccatcccatgaagaagggcaccgccgcctgtaagtacgattcctctgtctacaatatccgcagccagttccggcggtgtcttttccagaattccatgaacagtctccacaatctggcttgtagcatcctttaacgccacacgtatttcttctgaggtaagtgtcactgtcttcggcagaccggtgatcacatttctcccctttacttccattgttctcggatttgattcctctatagccgtaccaatctgaattttgatcttctctgccatatcttctccgataaaaagtccatgattctttctcacatagttcagtatagcctgattaaaagtgtcccctgcaactttcacagaagcggaaaccacaacccccgcaagagagataaccgcaacatccgaagttccggctccaatgtctacgaccagatttccaaagggcttggtcacatccaccccggctccgattgccgcagctataggttcctccaccatatagacatctctggcaccagcctgataggttgcttcctccactgcctttttctcaatctctgtaattccactgggaacacagatactgatcctgggcttgcggaaagctcttcttcctattgctctggatataaagtatttcaacatcttctctgtaactgtataatcaacgatcacgccctgtctgatgggacggatgatctccatatctgaagtaatgcgcccttccatcagacgggcttcttcaccgattgcacgtatcttctctgtatttttatcataaactacgatcgaaggctcatttagcacaagcccctttcctgtagaataagccagactgttcctggttcccaggtcaattccaatatcacttgtcggcatggaaatcccctttctgttcttacgttctcctcatccccttcaactgatcattactttttacagtctctaccggggacttatccggtttagttataacaactccataaaataatgcgatcaaaacagtccaacagggcttcacatcctgataagccggatcaaaatatattatttacgagaattgctataaataatctcttctattatatacaacttccatttaaaaagaaagtcctgcaatatgatttcaagattatttcagatatttctttacatattttccggtataggaaaccggtgactgtgccacctcctcaggagttccctgagcaactacggtacctcctttgtctccgccctccggtccgatatcaatgatataatctgcggtcttaatcacatccagattatgctcgatcacaactactgtattaccgccctccgataatcgtttcagaatctccaccagcttatgcacatccgcaaaatgcagacctgtggtaggctcatccagaatgtagatagtcttacctgtgctgcgcttgctcagctctgtggcaagcttgatcctctgtgcctctcctccggaaagctctgtggaaggctgtcccaaccggatataggaaagtcctacatcataaagagtctgtatctttcttttaatagaaggaacattctcaaaaaaagtcagtgcttcctccaccgtcatattcagcacatcgtaaatattcttatccttatactttacttctagggtttctctgttatatctcttacctttgcagacctcgcatggtacatatacgtccggaaggaaatgcatctcaattttgataataccgtcaccgctgcatgcctcacatcttccgccctttacattaaaactgaatcgtcctttcttatatccttttgccttggcatctgctgttgctgcaaaaagatctctgatctggtcaaataccccggtataagtcgcaggattggaacgtggagtacggccaataggtgactggtcaatattgataaccttatccagttggtctgttcccagaatgtccttatgttttcccggaatcactcttgcccggttcagatctcttgccaggcgtttataaagaatctcattgatcagagagctcttacctgagcccgaaactcctgtgatacaggtcatgatcccaagaggtatcttcacatcgatattcttgagattattctctgccgcccccttgacagtaagaaaaccggttggcttccgtctctccaaaggtaccggaatttttaattttccgctcagataagctcctgtgatggaatcctcgttcttcatcaaatcctctgcagttcccatggcaaccagttgtccgccatgctcccctgcaccgggacctatatctacaatacagtctgcggcacgcatggtatcttcatcatgctccacaacgatcaggctgtttccaagatcacgcagtttcatcagagaaccaagaagtctgtcattatccctctggtgaagtccgatactcggttcatccagaatataggcaactcctaccagcccggaaccaatctgggtagccagacggattctctgcgcctcgccgccggaaagagttcctgtcgcacgtcccaatgaaagataatccagtcctacatctgacaggaaacttacccttgccctgatttccttcagaatctgtctgccgataagctgctgctgctcggagagctgcatatccgccagaaaggctttcagcttctctatggaaagattggtgacctcataaatattcttatccgccacagtcacagccagtgattccttcttcagtctctgacctttacaggttttacatggagtaatgcgcatgaaagattcatactcctgcttcatggcatcagagcctgtctctctgtaacgctgctccacatttcggatcagccccggaaacgccacatcgtaaacgccctctccgcgctgccctttatagtaaacctttacagaatgtccattagttccgttgatcagaatgtcctgtatcttctccggatactcctcaaaaggtgttgccaggctgaaatcatattctctggcaagagcatccaggattgccctggaaaagcttccctcatttgtgcaggactgccatcctgtgaccacaatggcaccatccaggatactcagagatctatccgggatcatcagatcaatatcaaattccattttatatccaagtcccagacagtccggacaggcgccaaaaggattattgaaagaaaagcttctcggttcgatctcatctacactgataccacagtcaggacaggagaaactctggctgaaattgtgaatatttccatccatagtatctaccatcagaaggccctctgccagattcagcactgtctcaatggaatctgagagtcttttctcaatcccgggcttcacgatcagacggtctaccacaatctctatattatgcttgatattcttgtccaggctgatctcctcggaaagctcatacaggtttccgtcaatctgcacacgtacatatccgcttctctttgcctgctccagaagctttgcatgagttcccttgcgcccccgcacaacaggcgccagaagctggatcttcgttctctccggaaaagacatgatactgtctaccatctggtcaactgtctgcttcttaatctctcttccgcacttcggacaatgaggaattcccactctggcatacagaagtcggaaataatcatagatttctgtcactgttcctactgtggaacggggattgcggttggtagatttctgatcaatggaaatggccggtggcagaccttcgatgctctccacatccggcttctccatctgacccagaaactgtcttgcataggaagagagagattccatataacgacgctgaccctctgcatagatggtatcaaaagccagtgaagatttaccggagccactcagtcctgtaaataccacaaacttgtctctgggaatatccacacttaaattcttaaggttattaacattggcacctctgatcctgataaagtgcttcttcgttgtatctgctgccattgtgggcctcctgtttctcatttataaataataactgtttcttaccttgacagttacacctttttcgtatgttatgatattcatggattgtgcgcagtttcgctgccccgcaatcctcatggcatcagtataatacaggaacatttgttcgtcaaggcgtttacggcaaaaaatccgccataacggaattgcttacatgaattccctctctgctcagaaaaatccttccgttttcttccaaaagcagtcccattgacttatattttctcagaacatccccgtatattgcatctatttcacttccaaactgccgctcaaactcagcttttgagattcctctggtcatacgaagtcccagaaacatgaactccgccatctcatcctctctggtgaggggcggctctttttctcttattttttccggagttctgctgttttccagatattttttcatatcctgtgtattggcaaaacgttcctttccataaagagaggaagctcccaggccaaatcccagataatcctgtcggatccaatagcccacgttatgcctgcattctctgcctttctttgcgtaattggaaatctcatactgctcaaagccatattctctcagaatctgtgctgttgcctcatacatattgtactccgcatcttcatccggcaaattcagcgtccgcgatgcaaaaggtgtgccctcctcaatgatcaggctgtatgcggaaatatgttccggatccagtcctgcaacagtgcgaagattgtggatccatccttcataagtctgatccgggatcgcactcatcagatcaatattgatattgtcgaaccctgcctctcttgcacttctgtaagtctccagaaactgctcataattgtggattcttccaaggatcttcagttctctgtcatccggcgactgtaaacctatgctcaggcggttgattccatatgttctgtatgcctgcagtttgtttctgtctgcagtccccgggtttacttctatggtgatctcagcatgatccgcaatctgaaattttcgtcttatatgatttaaaatttctcctatgaatctctcatccaaaacagaaggagtgccccctccaataaatacagaggatacactccttccttttccttcttctgctgcattgatttcttcaagcagagcatctacataatcagcctgctcctttggacctgacggaccggaaaggaaatcacagtaatcacatttttttatgcaaaatggaatgtggacatagatttccatgggagaatctgtgatattccttctctccattgtaatctgctcctgttatgacctgttttctattcctcagtatctgatgtactgctgtcttgctcattgttatctgctgagtcgacactgttatctgtactgtcggcatcactttggctgtctgaactttccgcagatgagatacctgctgcatcctgctctgccagatacgtatttaccattgtcagattaccattggtggtaactgctgcggaagctacctgatccggtgccggagtgggacttgtctcttccggcgcaacactgatctggatcactttggaggacgcttcatctaccttcctggttttcccacatccggagacagaaattccaagcaataacatacatagtataactgtttttcgcttaatcattttcttcaatattttaaccttctgttgagatgagcactattcacagataactgttcagtaccttcacagttatgtggacagcaggctgccgaatagttaccattcatactttatttatcatccagtttcaatacactcataaatgctttctgcggaatctccacattgcctacctgacgcatacgtttcttaccttccttctgtttctccagaagtttcttcttacgggaaatatcaccgccgtaacatttggcaagtacatccttacgcatggctctgactgtctctctggcaataatcttgcttccgacagctgcctggatcggaatctcaaaaagctggcggggaatctcgtcttttaatttctcgcacatcttacggcctctctcatatgctgtatctgcatgcacgataaaggaaagagcatccacttcttctttgtttaccagaatatccagtttcacaagctcgctgcgctcatatccgcagagttcgtaatccagagaagcatagcctctggagcgggatttgagggcatcaaagaaatcatagataatctcatttaacggcagcttatatttcagaagcgcacgtgtttcttccatataatccattcccagatactgccctcttcgttcctggcaaagatccataattgcaccgataaattcagttgttaccatgatctcggcatttaccattggttcttccatgtattcaatctctgatggatccggcagattgcttgggtttgtcagattgataacttcgccgttagttttgtatactttataaataacaccgggagctgtggtcacaagatcaaggttgtattctctttccagacgttcctgaataatctccagatgaagtaatcccaggaatccacatcggaagccgaagccaagggctactgatgtttccggctcatagaacagagaggcatcgttgagctgaagcttctcaagggcatctctcagatcaccatatttggcaccgtctgccggatataatccgcagtataccataggatttactttcttataacccggaagtgcttctgcacatggtctgtttttgtctgtaactgtatcacctacacgagtgtcaccaaggtttttaatactcgcagtgatgtatcctaccatacctgctgtcagttcctcacatggaataaactgacctgcaccaaagtatccgacttccacaacttctgtggtgaagccagttgccatcatatggatctgggtgcctcttttcacacggccatccatgacacggcagaatacgataacgcctttgtatgcatcataaatggagtcaaagatcagggcttttaatggtgcatctacatcgccatgaggtgccgggatctttgttacgatctgttccaggacttcttctacattgagtcctgttttggcagaaatccttggtgcgtcatgggcttcaaggccgatgacatcttcgatttcatttaccacacgatccggttctgcacttggcaggtcgattttgttgatgaccggaaggacatccaggtcatggtcaagggcaagatatacatttgccagtgtctgggcttcgattccctgagctgcatctactaccaggattgcaccgtcgcaggctgcaaggcttcgggatacttcgtaattgaagtctacatggccgggggtgtcgatcaggttgaagatgtattcttcgccgtctttggctttgtatacgattcgcacttcctgagatttaatggtgattccacgttctctttcgagttccatgttatccagtacctgtgactgcatttcacgttctgtcagagtgccggtcatttcgatgattcggtcggcaagagtggatttgccgtggtctatgtgtgcaataatacagaaatttctgattttgctctggtctatcattaaggaattccctcctgagttctttcttatatactgtaattgatgggtttgctaattttgtattataacatatgggggaagggtttgtcatctatttatctacattggacgcacagaaacagttactgttgttactgttcacacacctcgcgggatagtagatatgaacagtaaccagaaacatcctagtacatcgtttcgtaaataactataccaatcgcgtaggatgcggattcgagtgtgctggtataaaaacgcaggcgtagcgggctacgctgaggcttttagacctgtgcaatcggattcgcagacaagtgagtggtatagttatttcgaaaacgatgtactagtaattggaattcagccctgcagtaccttgtctaagatgtcggcaaatggttccatggcattttttacttcctgaacagtgttggtctgggctccggcttccagaagaagggagcggggacggaggtggagattgtaacggtaacctgcaaggtaaattccccggtaaaattgaggatagtattgggctgcctgatattccagctggaaggaaaatgccaggttttgctgtatgtagggatttggcagatagtccagggaacctttggatgtcgtataactcagtccattgtaaaaaaggatctgggctgtgggttttccattgatttctgttacaagatggcggtcttcggggatgccgtcccggtgtaggtctatgatcacctggatatccgggttttcctgaagataaggttccagataatcgcgggcataatcgtaagcggcgctgcggtccagttcacctcctgccatgtcgaactgctctttgagatggactacctgataactgtagttttctgtgagaagctgtgtcagataatctcctactcctacaatcgtgtcggattcttctccttctctggaatctgcgaaggtttcctgagaatggctgtgatagatcaggatctgaggagtatcggtttctttagtgatttttaagtcctgtttcagaaaatcttcggcattgatctgtacggcatctgcttctgtgttggaatctacgatatagaattgtcccagaagataattataatctgccagtttttcgggggacaggtcaatcattggatgaggaactgcagcagcaatggtttctgtgctgttctgaatattttggtcattctgcgctgctgactcttgcggcttctgtgatttgtccgtttcatgattttccggtgacgcagttatctttttcggtttaggtgtcttgtctgatttttttgaagtttgttctgattctgatattttcgctgactctgatattttcgctgattttactattttcgaaggaattgctgtttctttcggtaccggtgtagattctggtgtctgtaattcttcagattcgtttttttctgccagcaattgttcggactgtgcacgctctcccagatattttccgttttctcctgctatttttttataggtttcaagatcttcacaggaactcgtatgagctcttttttccagaaagcggtacagaggcagatgcctgtacacattttctcctgtaaaaaatgtccccggcaatactgccagagtggcaaaaaagcacatgctaagcagaatgcagaacgctttctgaacgtttgtcacatggatcacctcttgacttatcctatgtccatgttttcccatttataccctgttcacactgacggaacaattttccggtcagccgcctatttcctcaaacgccatgttcagtccttctgagattgtgaagctcaggtattttactgtctcatccacatctttgggagttacaaacatggtgtgaagatgaggagatatcatttcttccagaaattctttctgttctgcctcttccagagcttccagaaggtgtgccatggaatcatggacgatagttgccgcatctactacggtgggtactccgatcccgatcacttttacctgcagattttcttctgtaagccccactctgtgattgcctacaccggaacccgggttgattcctgtatctgtgatctgaattgtacggttcaggcgtctggtgcttcttgctgccagcgcatcaatggcaatcactatgtccggctttgtctctgccacgattccctgtatgatttcagatgtctccatccctgtctgcgccattactcccgggataattccgctgatacggtgcattttttcttttccaagactctgcaggccatactctcttatcatatgtctcgttatatgaagattttctaccacatgaggccccagggaatcggctgtgatcgctgaatttcccagacctactaccagaatggacagctcacgctccagattgatcacattctgtaaatgacgggcgatttccagggaaatttctctgtgataatcctcatcatgtacagaaagccccggagcttctatcgtaatatagcttccctggggccgtcccattgttcgggcaccgttttctgtggtgatctttaccacagtggtacggatatctttctcttcgttataatcttcgtggatctccactccccggacttctacgttttcctctgtaaaccgttcggttgcctccagcgccaggtctgttcttattccgtaattatccaacatctcttttccctccgtacttcattcaatatttgttactgtttgctccgttcttataacaatcttttatatctatttttagctttttttatggaaatatgtattgacaaggaagattatttgagataatatatataagcatgttcataggagcgcccgtgtctgtttctatgacaggagtataataatattttatcgaattaaattggaggtgtacgaattggctaacattaaatctgctaagaaaagaattttagtaaacagaactaaagcagcaagaaacaaagcaatcaaatctgcagttaaaacttctatgaagaaagttgaagcagcagtagcaaataaagataaggcagctgcagaagtagcattaaaggatgctgtttccacaatcagcaaagctacatccaaaggtgtttatcataaaaacaactgtgcaagaaaagttgcccgtttagctaaagctgttaacagcattgactaattatagattgaatttttaattataagcttatgattaaaaaggacagccatcaccgtcatgtggctgtcttttttgttattatcttttgtaactgccagaatatccggcagttaccgtttttcttattttactttactgctgtacttaatgatcagtaattctacgctcagcttatcttccagtcgtcctgtttttactgattcttctgcatccacaaaatcttttactgcctgttccagttctgatatagtataggctctggcacatgttgtaatgtttctcacaacaaatccgggaactcccagtttcgaagctatttctgtctgcgcaagtcctgctgccgcaaactgttttgccaacagcagctggcgatactgcttcgcaagaagaaacaggatcctcatcggtggctctttcaatgtcagcagatcataataaagttccagtgcacgcttctgatttttctctgttactgcacgcaccatatcaaaaattctgttggttgtctgggtggtgcagatttcttcaatatcctctgcagtcaccacatccctgccttctgtataactgataagcttctccatctccatcctgagattccccatatcagttcctgttttggtcagcagaagttccatatctctctgggtgatctttttcccggctttccccaggatccctgctgcccagcgcatcagagttttttcatcctgtctgataaattccgcaatacttccgcaggcttttactgctttgtacatgcggtttctcttgtctacttccgtttctgcaaaaaccagatacagatagtccggcagctctttcatataatctgccagttcctcacacttatttttgaaaaaacctgtatcttccagcaaaacaactctgcgctctgcgaaaaatggcatggtttcacagaggtcgatcaactgttttacatcaatccccttgccttcatagtgattgaagttcatagtatcaccatccggattcagtgcctttaccagattctgtttatactgttgtttcagatatgcttcctctccatagagaagatacacctgtttaaaatttcctgatttaatgtctgcctgtatgtttttcaattttctactcctgaggctgttttgtctgtaactgttcagcaatctgttgttctattcacagataccaagatatcagactgcagagcagttactttgttactgttctcagtaacgttacttttattgtatcaattccatgacataatagccagcagaaaatttcagattattattcagccgcccagctccaccattctgtgaatgcatcttccggcgccttccatgatattttccggaaggaagatttcttccccgccctgtcctttcaggcagttgtagatgtccattaaggtggtaaccttcatattcatgcatgtaagctgtactgcaaccgggtaaaatttcttatcaggacattcaaactgaagatgctctacaatgctgttttctgttccgatgataaattctttatgttcagatttctttgcaaattccatgattcctgtagtggatcctacataatcagcttgctctgctacttcctgacggcattccgggtgtaccaggaaaagtgcatccggatgtgctgcgcgggctttttctacatcttttgcgctgaccacgatatgtctcggacatccgcccttataaaatgcaaaagttttctccgggagcttctctgccacgtagtgtcccaggttcggatccggaataaataaaatcttatcctgctccagctttttgcagatttcaactgctgatgaggacgtaacacatacgtcacattctgttttcagttctgaagttgtattaatataggcgacaactgcataatccggatactgtgcttttaattcacgcagaccttccagatccaactgctctgccatgggacatccggctacaggattagcaagccatactctcttcttcgggcttaaaatcttgcaggtttctgccataaaacgaacgccgcacatgatcacaccgctgcagtctcttttggacgcctgtacactcaggccataggaatctcctgtatagtctgctacttccagaatctcctgaccctgatatgcgtgtgcaagaatacagatatcctgttcttttttcattcgcaggatttcctgctgaatttctgctattgtcatcttctgaatcctttcttacttatatgttatgatgtttttccttttcccagggctgaagtggcgcaaggaaacctgctttcttcagctgttctccgatcagatccagcctttcctggctggatgcttctatcagatgatagtgatacccggaagtagcactgcttaatacactggaatggctgttgttgatcgcctggacaaattcattcacatcctgtctggaacgaatatccatttctgcagtgacacggccataaaccctgtggctgatgctgatatttttcacccgcccgccacagtccacgatcagattcagttcctccgctgcatgctcctgcccatggcgtactttaaattccctggtgcatgcaatatctttatcatgctgcaacacatatcctctggtcgttgacaggattcccggtgtagatgcacgtatcacagccatatcctgcacgatcacctgtctgcttactccgaactgtgatgccatcgccctggcagccacaggtttttcttcctgctgaaggagctttaaaatttcagttcttctctgagcagtattcatactttcccatcctttctccacgatataatcctatagcaaattatccgctgcaaaacagcttcgctgccatgttattatattgcatgaagattcttcatggaaatgtcaaggattggagcagaatgtgtcagtgcaccgctggaaacaaaatccacacctgtttccaggattttggcgatattttcctttgtgatatttccggagcattctgtctgtgcccggcctgcgataagctctactgcttctttcatcatttccggtgtcatattgtcaagcataataatatctgctcctgcttctactgcttcttttacctgttccatagtctctacttcaatctcgatcttacggacaaatggtgcatattcttttgccatggctactgctttcgctacgcttccggctgctccgatatgattatccttaagcagtacgccgtcagaaagattatatctgtggttgcatccgccgcctatgcgtacagcatatttttcaaaaacacggcagttcggagttgtctttctggtgtccagaagtgttaccttacttccttccagaagctttgaaacctgttttgtataagtagcgataccactcattctctggagataattcagggcaactctctctccggaaagaagcacccggatatctcctgttactgttccaagaagatcgcccttctttactgcatcaccgtctttaaagttgaaactgatctctgttttctcatccaggatctggaatactctcgcatatacatccagtccggcaatgattccgtcttcctttgcgatcaaatctacggttccttttactgcgcttcgcatcactgcattcgtggaaacatcctcactggtaatgtcctcctgaagcgccatacggatcagcttgtctgcctgcattttcattgtaatactattcatgactctttttcatcctttcaatttcttttaatacggtttcgtggcaggcattaagcagttcttctctgctttcatacatattcatatcaattgcatctgcccgcacatattccggtgtctgtccaaatatcatatcatctgcagcctttcttgcaaagaccagagattccaaaagagaattacttgccagacggtttcttccatgaacaccattacaacttgtctctccacacgcataaagtcccttcatggaagttttgcttcccagatttaccttgatcccacccataaaataatgctgtgccggaacaaccgggattggctcttttctcggatcaaaaccttcttccacgcattgttcataaatatgaggaaaatgttccagaattgttttctctcccagagggcgcatatcttcccatacaaactctgttccatccttttccatctgggcaaaaatcttctggctcagcagatctctcggctgtaattcgtttgtaaaacgctgtccgttcttatcatacagaagagcaccttctcctctgactgattctgaaaccaggaaacgccgtccgggtttctttgaatagagagttgtcggatgaatctggatatagtccagattttccatttccacatggtgcttcattgcaattcccacaccatctcccgcaatatgcgaaaagttggtagagtttttaaaaagcccgccgattccgccgcaggcaagaaccacatactgagaataaacaggaaatgcctggtcattccggtccattgcaatgattccgcagactgtattgtctttggagatcaggtctaccatagtcatatattcacaaatttcaatattttcttttatttttgcagcagttaagagagtctgtgtgatttcttttcctgtaatatcctcatgaaaaagaattcttggctgggaatgtgctccctctctggtaaatgccagatttcccagaccatcccttgcaaaatccacatgataacgcagaagatctctgataatatcattggagctgcggatcatcagatctactgcccgtttattattctcataatgtcctgcccgcatggtatcttcaaaataattttcatagtcatcttcgccgcgcagcatacagattccgccctgtgccaggaatgaatctgactggtctgcctcctgcttggtgataagcaggattttcattttctccggaaggttcagcgcacagtacagtccggctgcccctgttcccacaataatgacatcataatgttctttcatctttctttcctcacatcatgcctgattttcgtttgtctgtgcaattatactccccggatatataggtgtcaagacacctgtatataattatgacaacattgtttgctttgagttactgtgaacgtaaccactttgaaaatcctactgcttattgcttttcacatctccacagggggcttacttgattcggttaaaggcagaaacagattttccattgactattgtaaccgccccacagtctctggtgatcagcactctgcttccactcttcttcagccgttccagcgtatccggcgacggatgcccgtatgtgtttgttgcagaacaggaaacaacagccagttccggtctgacgatttccagaaactctgctcctgtagaatatctggaaccgtgatgagcagttttcaggaagtccacatcttcaagacacccattctgtatcagtttttcttctgtcaccattccgatatctccggtaaaaagccctttgaaatctttgcttatcatttccagaaccatcgcatcttcatttacttccttccctgatgctgtggactccggccacagaaccttcagtctgacagttccatatctgatctcatctcctgctttcatagtaagcacccggactcccgctgactctgccagctctgtcagctcccgataatttttattctcctgaatatcgctccatttgggcaggatcagattctctatgcgcagagaagtcagatctttctcaacaaattccagaagttcccgcaccccgctgatatgatcttcatctgtgtgagaaacataaattccgtccagtctggaaatccctctgctcttcaagtatgggagcagctgatattttcccagttcattcttattcgtactgcccccgtcgatcaggatattccatctgttttctatttccaccacaattccgtctccctgtcccacatccagacaggcgatacggaaatcttcatacggtctgtaactgatcagcagaattgcaaagcataccatacctgcatatacagcccggattttccacgcaaagatcttaccattttcacttttcttcacacccgctctgtacatccacaccgctgttgccagaaccagataatatccaacgatctgccacacttccggctttccgccgatccatgtacaaaacgaaagtcgccccaacagcactgtcaggaactcatatcctctcagaataatcctgcccggaacaacagccagaaacgctcctctgacagtgactaatccaagtaatgcaccggcagttccgcttcccagtacaatccccacagtaggaagcaccagcagattcagaaaaatccccagcatcgacacttctccgtaaagccacagcactatgggaagtgtggtaagctgcacaactccggatgccagaaatgacatcagaagtttatttctgatttttcccttctcattaaccttacttcgttttttccggtttaatacatccatcccctcctgcactaatggccagacacagccaatcccaatcaccgatccaaaagacagcagaaaacctccatcaagcagatacgccggattttccataaggatcaggatcgccgcagccgccattcctgtaggcatatcataaatccgtcctgcgatctttgcacctacagaaagtaaaaacatacatactgcccgcatggttgaaacagtccctccggtcatcatcccatactgaagcatgatcaccagcgccagcaggcctgccggccagatacccagaccgatttttttcagcagattatacagtcccattccaagaagactgatatggagccccgaaatcgccaggatatgtataattcctgccatctgataacgcattttcaactccggatccagatttgttttatctcccagcacgattgcttcaaacgctccagcttccattccacaggtcttctccagaatacctgcaaatttctgctgcatatcgatcaggaactgcccatatacagaatgactctgcgactgcttctttatctttcctttcttcatcacataatagatcctctggcagccatagtatgctttactgtcaaactctcccggattcgtggggctttgcacctcttccagttttccggacaccagaacaagacttcctgccagaagtttatcaacatcactgttaccgctatgattctttttttgttttaaataaacctttatattatcaatggaaactttttcagaattgtaaataagataagtatttctaagatatacagattgaaaatcttcattctcccggcacctgaccacctccccgcagatggtggattccggatgctttctgatccatgtctgcacagactgtggcagtggattcccccttatcagggaaaatcccagccagtctgtcacacacagaaaaacaaccagaagcatgcacaggatacacacagggcgtctcctcacttttgtgcctcctcttcgtttatgaatatcactctttttccttgactaccagcttatcatttctttcataaaaatgatacagctccatcttcttaccaaaggtatccagcctgtccttcccgccgaccgtaatctgcactttgtctgcatccagcgcatccagcagcgaatttaccacagaatataccggtattttctccgatacatccagcgcataggaagaaaatactccgtcaaatgccacatagcagatcctgtctgctatggtcacattcagaacctccgtattctccggaattgtggggtaatgccctttttccagcggtcccttcattaactgttccagaacgattctctctttggggatactgcgtttataccgcacagtacgctgttcttttaccagcttctgaccactcttatcagtaaaataaagcgtaaaggtattgctgcaataggcatccggttcagttcctgtgaactcggcaaaggtatctgcagtcatatttcccacagcctgtcccctggaatctgtcagatcttcattttctattgtaaaacgcacagaattgatccccggaacctgaaggaaagtcttcacaacacctgtccgcacaagtaattccctggcgcggctcatgctgctgtactgactgttaaagttgaccaccagcacgtcctcttctacactgtaattcatctgtactccttcaggaagcagactgacccggttctgcgaatctgtctgctggctgttcatccgctgcatcatatccttaagcatatagtctgcagttgtctcctccggagagtagcttttcttctgaagctgagtttcatcagagctgatatcgtacagataatatttggcatcctgtttacccggatcttcatgtatctccacagaacacccggtcgcaaggatgcttagtattaacgctgttataatgattgaaagtttctttttcacaatggcacctcctatgacggtatataagacagaggaatacgcacagagaatgtagttccctctccttctttactgaatactttgatcgttccatggtgcattgcaacagaactcttggtgatcgccagtcccagaccggttcccccgatttccttggaatgggacttgtccacacgatagaaacgctcaaagattctttctatactgtcctcagggattcccataccggaatccgccactgttatatagaaatatttatggtctgcatccagtgacacgcgcacccatccatcatccacattatatttaatgccattctccaccagattgctgacagcaagagtaaacttcacctcatccacatctgcatccacaggtcggaagcaatccaggatcagatcgatattgcgcctgtctgcaatgggacgcaagcgcttgaggatatcctccagaagctgattgatatccatatgggtgatgtttacatctgctgctttcttatccatctttaccagcgagagcagatctgtaatgatcttattctctctgtcgatctcagcagtaatatcactcataaactcctgatacagttcctccgggacgccctgctgtccaaccagagaatctgccagaaccttcatggaagtcaggggtgtcttcagttcatgggacacattggatacaaactcctgcctggattcatcaagaattttcatgcggttgaccatcttgttgaatgcatctgtgatcagctctgtctccgtatagtcaggaacactgatttcttcatccagcatgccatctgtcaggtcttcaatggccttcgtcactcttgcaagtggttttacaagtattgtagagagcagccatgccagaaatactgaaagaacaacaatacttccgatcagcatcacgcctctctgttccatctctgccagtgtttctgcaatatcaacagccgaaacacttaccagcatcacgccctgaagctgctgcacatccggactctgtacaggaactgcaagctccagtactttacttctggcgtcataattgcttgtctcttctcctttcagacaggctacagccagtgaactgagaagcgtctttccctcctctgtgtggaaggtatcacttactatcttaaaatctctgtcagccagcaggatacgtccgttatacacattggaaaacagttccagcttgctgtttacaacctctgaatctgtatcattgagataattctccctgatgatcagattacataaaatatcgcactgatcacccactgtctctgtaagcattgcaaccgcccggttctgatagttatgaagcatcgtatatgttacaataacccccggcacgattcccagaatgatcaggatgatcagaatacgaaaacgcagacttctgaaaaaattttttctttttttcaccttttcaactccgttctcttctgtcatgcagtttgatgcatgctttctgtctgttcgtaaaacagtcattgtttatcgaatccttatcatcttatcacagaaaaatgggcttttctacatcttagcgaaaagtaatttattttttgcagcaatcaatgcgcaagacatatctcaggaaatattaccatgaacgaaagatacccaaaatactatttgtattgactttattttttgattttcatttcaggtcaactataatcaaaattttaattgacctgcgattgtacttttattatatgaggtcaatcctgaacatgtttattgttgactgcaattgctcttttattatatacggtcatcattaatcacgtttattgttgacctcaatcgctcttttattatatacggtcatcactaatcacgtttattgttgacctcaatcgctcttttattatatacggtcatcactaatcacgtttattgttgacctcaatcactcttttattatatacggtcatcactaattatgtttatcgttgacctcaatcgctcttttattatatacggtcatcactaattatgtttattgttgacctcaatcactcttttattatatatggtcaatcctgaacataattatagttgaccgcaaatactcttttactatatatgatcatttttgattctccgaatagatatggcacagtcaagctatacagcaactgtctttacaaaatgaattttattaaactctgtcaaatattaataacctgcatacgtattctctctcatatgtacagcaatcgccatccaactatttctgccacaaattccatcagccaactgattcgtattcttctgaaatgtacgaagcgcattttctgtttctgttccgaaaataccatctgcctgcacctgtaaaaatacctgcagcatctttacagctgtacccgtacatcctctggataattcaggaaagatgactcgcagttcttctgtcagcgttatttcctttcctcctgaaggtgaattctctttttcctttccctgaatcagctttttaaaacggttccagtcattttttgcacggatagcggaaggacagtttttggcgcatacatcatagtgctgtactactctgtctgccggaatattcaattccgacataagctgtctgcacacctctgctgtatttgcaaatgccttatcataatcaaaaccggcctgcacacacatttcaattcctacagaattacggttattcactgttccaaataatcttcctccataattcacccctacatgccatgcgcctctgctatatggcattgcctgatatgctgatttatcatccacatacacatgagctgaatatccatcaaaattcccatgatactgtgccattgcatgagccctggcatctgcacctgtgctgtaattgtccgtattgtggattacaatatatcttggtatttgtcccgaataactgtttctttctgatatatactgctgatttatattcataatctgctcctttctgctgaaatcatatatcttttctaagtctgtttttctatcgtattttgtgaatgtcgtttcagtacatcaattgcctggcaaatgctttccggaagaggcagacccatcagtcccgcattctctatgatagaaagaccttcatttgcaataaatccaatgcataccgcatctctcagatattctgtccccatcaatgcatccagacgggcagcaatgagaacatacaacaatgtcatgccttttctgcacaaacctttccatccagctctgctttccagtgcaccattttcagatttcggactttttccaaatactgccggaagaaggattcctcctgtaaaccagtcgattgccataaacaaaagcaatgtctgcaggaatttatcccagcctccaaaacacactgccagagtacttccggcaagaccaattaatgtaattattctgtatttcatagttttcacctctctttttcttaaaaatgggtacaaaaaaaacggtcggtgggggaatgccaatcgttctcttcataatcaactttattcatctttaactttgttcctgtcaaacaatcataatatcactttcgttccagtctatagatatctcttcgccatctaagtaaatcacataattttttggtttttcttttccaagatagccattataacttatctgttctccatttttatttacaaattctttttttgtaaaaattgtattttgtgtatctgatatctggaaatctttattatctttctttccacaaataacactgatatacagttctccggttatcgtacattctcgcacaacaattgtattatctttcttaaaatcagccctattataaagacattttatctcagaatgtgatgtacatttccaccctccttcttctttataaattattttactattcatttgtctatcttcaagatataatacctctatggaatcttcaccatatatttcatctattttatttttttcaattccataatacttttctgcctgatctgctgttgaaaaactcacatatgcattttctatttcgcaaaacgacattacaattagaaataccgtacataatatcgcccatgttataatccactttgacgcaagctttttcattttcttcatgattgccaggcctaaacaaaagacaatactataaataaatatacgtacattattatatgtaatccctgcctgaaatttactctctcccgggtgagttcgctgataattagttccagttaccatagcatagaatataaggtttatcaaaaacataattaacgtttttaacgatatttttcctttttgtttcttttgtctgtatatccttatacaagtacaaatcatgaaaacaaatagtaacagttcagcaatatttagtatttgtatatccatatttctgttctccttaattctaatttgaaccgccagacatatttcactttcattttctcaattactcaccgacttttgccgtaacataataccagcccttttctttctcagacagattaatttcatattctattcctccatattcttttaccatctgaatcacatctgtccgactgtcatcattactataggcaaataaagaaaatccactgtccaaaaagccttgtgtataccagaatcccactgtataactgccattatttttccggactacaacttctccacctgaagaacattttttataatcttctggtagttcgattaattccatatctttccttatttttatctggttattctgtaccatctgaacaatttcagtccttttttccttatatacctgaaagtttaatttttttattccatcattaaacaaaaatgccagatatattccaaatagaaaaactggtattgccgcaaaccaaaatacacgaatctttctcaaacagcaaaaactccgtatgatatatataaaagttaaaataaatgatgcaaaaataacataccaaaatcccctgaaaaaaagttcttcgaaataccagattgtaataaaatttgcagttatcacagctatgcattgtaatataattaattttaatttttttctctcatccttcattcccgattctccagccaaataccaattcttatactcagccataatcaccacccttattctttaatgttgaaaatacatcaacagttcattttgtcagctattcctgtaataagcaatcaaacgtttctgtcgactctcatcacagttttccaattgaatctaaaatgatttcccgctatttctttatatgtttccgaatcattgatattggaaaaataccaggccgcagcctggctttcgtagcattcgtatccatttttccgcagaaaagcaaataccgcgcctttgcgcagggtgatttcttcaagcatggcatctgccaggtctgtacagtatactcccataagaggttcctcatgcccgccgtggctcagtatcactgcttttgcatctgaatgcagagattggcgaatcagtgcagccaattcctctgccggaaccagaggaacatctacaccaagtaccaggcaatatggattctttgctttacgaaaacaggcttccagccctcccaacggaccttttcccgggaagcggtctggtataatgggatatttatatttattttcaccatgatagccagacagaagaatatcactgattccaagcttttcccccttttctatctgcatctcaagaaatgtcttcccatctatcgtcagatctgatttgtcccgtcccatgcggctgctggcaccgccagcaagaataatcatagaaatttctttctttctcattatcagttttcctttttgtttatataaatcatcaataaaagtattgattttttcttcatatttaaaaactacagacagaaatgtctgcataacggttagggtgtcttacatatctcacccgccaatctgtgacattcctctgatttcatcctgctctgtcttcgcttcataaaaattatggctcaccggtttattccagatcacctgataaattgcttttttcagttccgaatctgtgcagccgccgcgcataagcccccgcaggtctgtacctttctgatactggaggcatcctttcatgaatccttcggatgtaagacgtactcggttgcactgactgcagaatttgtgagtcatggcactgataaatccgatttttcccttaaatcctgcgatttcatagtaatggcatgggccgtttccgtagcgttcattgactgcatgcatcggaccgtaggcttcttccagtactgctttgatagattcttcatcctggaatgggaactgttttccaaatccgattggcatcatctcgataaagcgcacatggattggatatttctgcgccagtcctgcaatcccgatgaagttttctttttccttgatcaccggaacgctgttgatcttcagggaaagtcccggatgtgcaagtgctgctttgattccctcaaataccttttccagtccgtcacgtctcgctacttttttgaacagttccggatccaacgtatccagactgatattaatggcgtcaattcctgcatccagtaatgcatctagctgcttggcgagcaggattccatttgttgttaatgtcactttctcaattcccgggatcgccttgatctgttttgcaagacttgcacagcccttacgaacaagaggctcaccgcctgtcagtttaatcttacggattcccagatctgctgcgcacctgcagatgcggagaatctcatcgtatgtgaggatttctgcatgagaaagggattttacgccttcttccggcatacagtaaatgcatctcagattacatctgtctgtcagggaaatccttaaataatctatttctcttccatatttgtctatcatcggctctacctgccttttactttctaataattgattttcctgttaccggatacgggtgaaccgcaacctttgtaaccttttcttctgttattcgccgtcaaaatcacaggcaatattttctctcataatcgtttgacactccatactccgcagtctatacttaatgtatcaagattattaaaatccttaccggacgaaaggaactgtcctatgaaaatcaacgaacaataccacaacctgaatctgctcgagaatgttacctatgagtttctggggcgtgacggagaaactcatgaagaaacagaaccaatccttgtggaacacatgatggatgtatatgtaaatgaacgtctgaccatgaaactggtctgtatcccacaacatctgacagaactggttctcggccgcctctttacggaaggtatcatctcatctgccgaggatgtggagcagatctacatctgtgaattcggcaaacgtgcccgcgtgatcctgagtaaaaataaatccgggcagtctcatgaggaaaatgaagattatgttgctcttactccgacctgctgcaccggaaatcgtgttcttaatgattattttatcacagatcagccaatgacgccagttacacctgtcccatggaaaaaacagtggatctttgatcttgcagactgtttcgccaatggtaccccgcttcacagccagacctgggcaactcacagctgttttcttgcctgtgacggagaactgctctttcagtgcgaagatatcggacgtcataatgctctggataaggccatcggttatgccctgcgccataatattgacctgaagaaatgcgtggtttattccagtggacgtatccctacagatatggcgatcaaggcaatccgcgccggaataccggttctggcaagcaaggcatccccttccgccgaggcagtcgccatggccaaagaataccaccttacccttatctgtgccgcgcgacgtgaccgtatgaaactctttaccggaaataatccgacagaataaattctgcaatacactctgcattgtccagttcaaagaatggaacattttccagtacagacagtgcatctctttcctctgcatccaggtttgtggcgatcgccatcagtttttccggattgcagacactttctgccgaatttcccttacggataatttcaattttcggataagtactgtatttaaatccttccagtaagatcagatctgcctccggaaaaaattctgccagctctttttcggaaatctgcggctgctgttttaccagcatatatttgcctgctgaaaaaactgctgtgccgtaggctccggactgaagctgacagtatgtatccgttcccggtacgtccggcacgaaatcatgtccgtcatgcttcagcaccgccactttaaggcccttgtctttaaaaatctccaaaagcctgcagatcagagttgttttccctgaattctttacaccgctgattgcaaatattctttttctttccacctgtttgctgctcctctcaaagcaaaatcgcgcccactttatcccctgcgttcaggcttctgctttcctgattttccatggtttttgtatcaatcaggcaattgcagccggccatggaactgaggactccgttagagtgaagaccattgggaagatgaaattttccattttccagatatgcccggataaagcggcggcccttgattcctttttcaaagttatcagccataatgccatttacttctttcagaccgattgatggatcctgcatcattttttccaatgcaggacgaatcaaaagttctatgctgactgcaacaccaaaaggatttccggagagactgatgatcggaatctctctttctgaagcgcaatgatctgttgcagttatatcggaagtttttttatatgcagaaaacagtgtaggcattcctggtttcatctttaccctccagaaaatccgctctgcccccatcagtctcagggactcatgcataatgtccttcttgcctacagatacacctcccgtagtgatgatcatatctgccgcttttgctgcttcttttaatttctcagacataaccgtcggatcatctttgactgcttccatatggaaagattcgattcccagttcacgcagtctagcagacagcattgtcatattgctgttgtaaatttttccttccggcaatggaattcccagttctaccacctcatctcctgtagtcagaagcacgattctcggctgacggtaaaccggcactttcgccactcccattccggccagaattgctgcctccacatatccgatatgtgttccttttttcagaagtgtagttccctttttgaaatcctctcccgagaagcaataattactccatcgcttctgttcactgtaaacttctaccgtatcttctccataatcggtatcctcctgataaatacagcagttgcagccattgggtattgcagcccctgtcataatgcgcactgcctgtccctgctggatttctctttccgaatactgtccggcatcgatttcttccatgactttcagcctcaccggatgctctttagtggcacctgcaaggtcctctgccttacacgcatagccatctaccggagagcggtcaaaaggaggattgtcaaaccctgccaccatatcctgcgccaggactcttccccctgctttattcagttctgtttcttctgtctcgtttattacaggcgtatgctgcagaatctgttccactgcctgttctacactgattccctccacgcactaattcctcctcttgtatattacattttttatagtcttttcaatacctttataaccaccgggtcaattgacggatatattagttttaccttttgaactctatagcaatttcagagaataatatcactaagatactccattagagccttattttttataaaccagattgtcttcagtattttggaaattgctataacatcataatattcagcccactgctgaagaattacatatttttcatctctgttggagaatgatttctccttctctcagcctccctgcctccagaatctgacagaatacaaaccagggttccatgggcgtgcataccttttctcccttataagcatctgatgcaggaccgcccgcaccaatcctgactgcttccagaagtacatctccacaacgaaatctgttcccctccgcaatactgttccagttaatcccttccacaaggagattttctccaaatctgccacatctgaattcttcttcggactgttcgaaatattcttttaccttctcataaggaagaagactgacctgctttcttccgcccattccataatgcacatctcccacaagtccctgcagatcagcttcgcattcatgaatgttctgcgagcaggtcttgcgttccttactgatgcatacacataatatcttcgccattttctgtctcatccttcctgatgtgttactgttcactccgttcacagcaacacgcttcgcgatgcacagaatttatgctaatcgcataaattcgcgcggtatgtctcgggttttctgtgaccttcgctcacaaaaaacacctcgcgggatattaccagtgaacagtaaccctgatatctctttataaaaccacgtactgctgtttttcctgctttctcagatcgcccagaatgcaatattcacattctttcctgcattctgcagatgctccacaagttcttctgctacctgttctttccttttttctgtgattcccaattccacgttactcttattgatagcaccaccgaagtagaaattaatatccgttgcctgctcaaacagcatcacaccaagcaatgctgccgcatctttttttcgtttcagcctgttaaaggacagcctgtcctccatccattcttcacaatattcaagcaaatgctcaatcgtaagaaatccctctgtcaccagctctgtaccttccagcttataataggcaggaacgtctccgcaggcagtttcactaagagagatcagctctttatccagatatctggcagcacactgtgcagtagttccgccgcagattacatgatatccctctgaatcgaaaaaggacttcagatatcgctcatcatgctcctccttacttggcgggccgatcataaggtttaccacctgtttatgccgcatccgcaggacaatggctgtaatatcatcatccgtttcattcagattcagatccaggctggcctctgccagatagcctgccatctcctgtgcgctcatccctttatggtactttgccctacagaaagccattacatcatctcttccccagccgccgttggtagtttttcccattcccgcattggtgacaccgtcggacataatgatcagcatatcctcatctttcagttcaaaacagcttttatggatttccttctcttcgatcatacttgtctccaccggataatcaaagagcttgccatcccggatcagaattgcatccggattatcaaactgataaaggcttacctgtttcccctgaaaattcagcactgtaaaagtagcatatgccagatttctcacactgcacacaggaagcgtttttgccactgcacgcactgcctcatccagttccacctgattaatgatcatggtactgagcatggtcgcagtcagcgtggaaaggatattcgcctttactccgctcccaagtccgtcagaaagcaccagaacatggtcttcatcattttcttcaatcttatagcagtccccacagagaaattctttctttttattcaggctcacatgaccaaaatccatgcataagccgtcaaattccacattcagtccatgatgcttatttcttttcattctcttcttcactctccagaagtatggtatttttcagtttttctactgccactttggtgtccgcagcagtttctccaagaagtccggcgatctgctgcacgatcttcagctgttcttctaccagcttatctgccatacgcgcagcttcaatctgggcattatgaatctgatctttatgcttccgctcctttgtaatatccttcataatgcagagaatcattttattttctttatcattcgtcattacgcgatccagataacatttctgatcctccagataaatctcatcctgcatcagattccgttcaaaagccagtatactcgccagactgtaatcatccatgatctccgataccggtttcccgatcaggcgccgccttttcggcatattgaacaatttggacgccgcctcattcatctgaatgatcttcagattataatccacagttaccagaagtccgggcatggcattaaagactttattggagtaactttcctgttttgcccgcatatatggaatgcacatggcaacctcagctttattctggataatggcaattgccttttccctgcatgtgttgtacccgcaggcaccgcagtttaattcatcctttggagaaaattttcccatttccgccagagcatccctgatttcttcctctgagacctcttcctgttcctgtgcagaacagtaaccgaaattctttctcagttcaaatcccggaagttcatagtctccctgctccctgtgaaaatcttttccaaaggctgcattcttcactgccagaacatctgccagataatgtcccttcttcatctggaaagaaggacctgccacacagccgccgctgcatgcatacatctcaagaaagcaattttcaaaatcctccggatgaagttcttccaaaacctccttgcactgctccatcccgcttacagaaagcctgcggattccctttacagctccaagcaggtctgttaaaccgtccgcaatggcgatttctctggaacggtaggcaatctgctcaggttctttctcagttatggaaatcccttcttttttcatccattgcaccagctcttccaatgtgatcacataatccacttcatttcctgagtctctcaactctgacatagctgaaatacagggacttacatagacaatctctgccttcggatatttttttttcagataactggcatgaaactgcatcatagaggcagactgtaccagatttcccagaagatgcgggtagtgtttcttgacaagctgtacgattacaggacaggcagaagagatcattattcccagctctttctgttccgcaaaaagtgctctgtactgcgaagtcatcaggcttgcaccttctgctgcatccgctgcatctgcaaatcccagcttcttcatcgcttcccttattccattgataccggttaccccaaaacgtgccagatatgccggatgaagagaggctataacctgcgtcttattctccattgcattgcagattgcaggaatcatattctgctcttccttggcatcctgcgggcaaacaaggatacacttctcacagtaaatacactgactttctatgatcctggcctgatgatcatgaacacgtatcgccttgaccgggcagttccggacacatttgtaacaatttttacaactgacttttttaaactgaaggattgactgaaatctctgcatgcctcgtactccttattatgtaacactatatttttcacaaaaaattatctgtaaccgttccgtactttcacagaatgatgtactgccgaatgattatttttgcctttccataaaggaatatggagctgccgcaaggacagcagatccatgtgcgacagccccatataatatttacgatatcagattcggaactttgtctccgatattgttttatgctttctcaatcttaattgcgcataccttatattcaggaattcttgcgtatttgtcaagtgcggcgttggtcagccagtttgcatttccatccgggaagtggaatggcatccagctttcacccggtgaggtctttgtacctacacgtgcggtagattcaatggatcctcgtctggaagaaactctgactttatcaccgtttttgatacccagcttatcggcatctacgatgttcatttcgataaatgacttaccttcgatctccataagctcaggtgtctttcctgtcatggctcttgttgtgtaatgatacagaatacgtcctgtcataaggatgattggatattcctcatctggaagctctgctgacggtacatattttgcaggatagaaccagccaagaccgcgggagaatttaccaacatgcatgatcggtgttcccggatgatccttggaggtacatggccactgaagtccctgtccatgaacttcttcactgtcaagacgttcatggctgatacctgcgaagctcggtgtcagggatgcgatctcatccatgatctgagcagaagtcagatgtggctgcggatatcccatgcggttcatcagatcaataataatatctgtatccagtctcatctctccaggtactgtgacagccttgcggactctctgtacgcggcgctctgtattggtaaatgtaccctctttctctgcatagcttacaccaggaaggataacatctgcatactgagctgtctctgtcatgaaaagttcctgaagtacaaagaaatcaagactctttaatgctttgataatatgtgtggtatccggatcagtaactaccgggtcctcaccatagatatacagacctttgatctcgcctgtgattgctttcgggaatacatcagttgcatgagttccgatattcggatcaagttttacaccccatgctttctcgaatttctcacgaactgcaggatcagtaaccttctgatatcctggatatacattcggctgagcgcccatatcgcaagcaccctgtacgttattctgtccacgaagcgggttaacaccacagccttcacgtccaagcttgccaaccatcattgccatattggacatggacataacaccctctgtacctgtggaatgttcggttacaccaaggcagtagatgatcggagcgcggtcagcttttgcatacatgatcgctgcttttctcagatcgtctgcgtcaatgtggcagatttcagctaccttctcaggtgtgtaatcttttacgatttcctttaatttttcaaaaccttcggtacgctctgcaatgaacttgtcatcctgaagaccttcagaaaggatcacattcatgatgccgtttgcaaaagcaacatttgtaccaggtttcagtttcagatggatatctgctttcttagccagaccgatatcacgaggatcaactacgatcagcttgcagcctctcttgatggcctgacgaatctgcatgccgactacaggatgtgcttcctcagggttggaaccaaccagcatgatcagatctgcattctttgtgatatcctcaattgggtttgtcatggcacctgagccaagagtcatcgcaagacctgctacagatgcggaatgacatacacgtgcacagttatctgtattgttggtgccgaagcagcagcgaaccatcttctgtaccatgtaaatatcttcattgggtgatctggaacatgcaaagcctgcaagagaatcagagccgtactgtttcttgatctccataaatttggaagcaacaagatccagcgcctcatcccatgttgcacgttcgaattcacctgtctctttattcttgatcagcggatatttaatacgctccggtgactgtacgaaatcgaaacatccgctgcgtcccttaacacagagcagccctttgttggacggtccgtttacagcttctgtatctacgatctttccgtcttttacaaggagataatactggcagcctgttgcacagtgaggacaggtagtcagaaccttcttgtcaatctggtacggacggtatttctttctgcgcttcatggtcagtgcacctgtcggacaggcctgtacacagttaccgcaggattcacagataccttcgttccatttatgtttgtaatgtgcaccgatcactgactggaaaccacgattcatagtgtcgatggcacctcttcccacaatctccttacatgtattcacgcagcgatggcagagaatacacaggcttggatcataggtaaagaatttattggtatcatctatcggcatatccttcatttcaccgggatagcttgtctcagtcacaccatattcaaaacagtagtcctgtaatttacagtcaccgtttgcctcacatgagaagcagtgtacacgatgatcagaaagaaggaggtcaagggtatctttacgatatgcaactaccttctctgacattgtctgtacttcatcaccctctgagcagcgaagtgtacatgccgtatcaaatttggttcttccattgtttgttacttctaccacgcacaaacgacaggaaccatccggcaatacatcttccagatagcagagtgtaggaatctccactccgatctgtctggcagcctgcagaatggtcgtacctttttccacttctacaggaattccatctattgtcaaatgaatcatcttttcaccctccttaattcacagaaattgcgccgaatacacaattttccagacatgttccgcacttaatacacttggaggtatcaatgctgtgaggctctttcttatttcctgtgatcgcaccaaccggacagtttctcgcacacttggtacatcctttacatttctcaggatcgatcacataagaacgcattgccttacatacatgagccgcgcactttttatcaacaatatgctctacatattcatctctgaagttccttaatgtggaaagtacaggaagcggtgcactctttccaagtccgcagagtgaacggtccttgatgaagtttccaagatgctccagtttatccagatcctctacttcaccctttccgtctacgatcctctcaaggatttcaagcatacgcttggtgccgatacggcagggaccacatttaccgcaggattctctctgggtgaagcccataaagaaacgtgcaacctctaccatacaggtatgttcatccataactaccagaccaccggaaccaacgatcgcaccatatttcttaacagagtcgaaatcaagaggtacatccaaatgttcttctgtcagacatccaccggatggtccaccgatctgaacagccttaaacgcagcaccggatttcagtcctccgccgatatcaaaaatgatttctcttaaggttgttcccatcgggacctcgatcagacctgtattctcaatagaacctgtcagtgagaaagtttttgttccaggtgatccctctgtaccgatacttctgtaccagtctgcacctttgagaataatctctggaatatttgcataagtttctacgttattcagaacagtaggtttcgcccataatccctgttcaactgtacggggcggttttacacggggcatacctctgtttccttcgatagatgcagtcagggcagaaccttcaccacatacgaaagcacctgcaccacggttgatatgcatatggaaggagaatcctgttccaaggatgtcatcacctaacagtcccacttcttccagaactgcgatagcgtgtttcagtcgtgctacagactgaggatactccgcacgtacataaatataaccatgctgtgctcttactgcgtaagctgcaagcatcataccctcgatcagacggtaaggatcaccttccattacggaaccatccataaatgctcccgggtcaccctcatcaccgttacaaaccacataatgaacaggatcagcctggcgtgctacctgaatccatttcttacctgccgggaagccgccgccgccacgtccacggataccggatttatcaacctgatcaataaccagatccggatccatctcaaacattgctttctccagagcctgaaaaccgccgcttgctatgtactcattcagagattctgcatcaaatttaccacagttcttcaaaacaatacgggtctgtttcgcgataaacggaatatcttccggtccgcggcttactttaccgcctttctgataaagcagtctctcgatagtctcattaccctgaacactcttctcaaaaatctcctggcagtcttcgatctgaaccttcgtatactggatcacatcgtcgcctttctggatacgaacaagtggtccaagctcacagacaccctgacatcctgttttctttatacctacatgtgcatctttgtcatgaggtccaaactcaatggtaactcccggagcatctttggcaatctccatgaatttctcatagattttctgagaaccggttgccacacatccggtacctgaacagacaagaatacgacagtcataagaattaagttctttcacagcttcttctctgatctgctccaatacttccttattctggatcatccctgttcgccccctctcagtttatcaatcagctcatctgccttctccggagtcattctcggatatacctcttcattgaccatcatagtcggtgcaagtccgcaggcaccaagacaggaaactgtttccacagtaaacatcatatcgtctgtcgtcttctttgtctttgacagccccagtttcttataaagttcctccagaaccggtattgattttcttacatgacaggctgttccgtcacagaccttgatcacatatttacctttcgcatcaaatgagaaattctcatagaatgtggcaacactgaacgctttcgcttctgtcacaccgatctgctccgcaacatatgtaagcaattcttccgggagatatctgtacaccccctgaatatcctgcatgatcggaatcagtgatgccggctttttaccatagaaagcaatgatctcatccgctttctgataaaatgactgatctagcatttcgcaccctccttatacctgttttttctctttttattgcactctttacatattgtaacgttaattatatgcctttttcgtcattttcacaagcgcatttatagaaattttctaattttttatcattttcctctatagatgtttgttttgtttgtctaatttttatcagctttgttcaatactaaaccatctcagatgtaaaccaaactaaactgaatcaaactgaactgccactctttctctagagcgtgtctgaaaaaggctttctgcaagatgtgcatcacaatcagtcctaacaaaaaacagaccgcattttatgatctttgtttcataaaatgcggtctgtctgtttcacacgttctttttattgagcctggaaataatatccaacgccccatttggtgtgtacatacttcggttcacttggattggtttcaatcttctcacggagacggcggatatgtacatccacagtacgtacatcacccggatactcatatccccatacaatgttcagcaggttctcacgactgtaaaccttattcggattaaataccagaagctccagtacatcaaattcctttgctgtcagattaatctctttacctgcaataaatacacgtctgccttcacagtccatacgaagatcgcccacctgaatgctctttgccttttctttctcctcgtggtcgcttcccgcacggcgcatgatcgctttgatacgtgccttaacttccaggatattgaacggtttggtgatataatcatccgcaccatattcaagaccaaggatcttatccatatcctcgcccttagctgtcagcatcacgatcggcacattggaaaattcgcggatctgctggcatacttccagcccgtccatcttcggcagcatcagatccagaaggataatatcatattttttatcttttgctttctctactgcctcttctccatcataagcgcagtctacctccataccatcctgttccagactaaaacggattccttttacgatcagtttctcatcatctactaccaaaactttcctgctcattcggttctccttatcctactactatctcatcttttatctttgcaaaagtaccttctttgataccctgtacattcataatatcctctatcgcagcaaatggcccgttctcttctctgtaggcaatgatcgcctgcgcacgtgttgcaccgatccccgtcagcgtagtaagctgagcttcatctgctgtatttatgttgatcctgttatcctgctgaacctgagcggtcatccctgtgttctgtcctgtcccggcacttccattcatctgtccatctgatgctttggccatctctacaggatccagcccctgccgctccatctcttcctgtgtgagaatataaagctgctgtccgtctgtcagaactcctgcacggtttacacaggttagagctgcctcgggaagatatcctcccgctgcctcaatcgcctgaaacacccggctcccggctgccagctgaaaaactcccggattcgcaactgctccgcagacatcaacatagatcatcgcctgctgcatttccttatcagaaactgcttctgacccattatctatatcagcatctgaagtatgtttcccggaatcacttcctgtcccattacctgcatctgaaccatctgattctgcctgttttttccggaactctgcagaattgccaccatcattctgtcggtcttctgtatcagctttcttctcatctgtatctttcttcgacttctgtcctgatgttttctcttctgatgactccgcatccacctctgctttcgcttcctgcagtccttcaatcagaaactgtgcctctctgctcttacatcctgtcagtcctgtaagaaacaaagttccacacaatatcagcgtcacagtataacaacatctgttttttatttttatcataagggtcctcctcttatttctcagagtaagagtcccctgtccataatgccacccttattgtaacgaaatcttaaatattttacaatagtaaaatcttatttttgccatttaaatataataattccgaaaatcgcaatcagcaatccaagaattttgcgccattcaaatggctctttgtctactccaaacaacccggccaattcaattacataagcaactgccagctgcgaaataacgatcagcattgctgcctttgcaggtccaagggctcccatactctggattactgtaatggtaataaacgctccgatcactccgccaagaagtgtatatttattgtccacctgccagagtgcagccacactttcccgtcctgtaaaaagccaggcaagaacgcagactgcaaaagccgacagctgtacccatccggttgatacccagaggctggtctgctttgtcacctccgtattaaaaacaccctgaatgctcatcagtgcccctgaaatcaatgccactataaatccccacataaatctgccctcctggataatatgatcattctgcttactccggtaatcatttttatgtcgaaaagaggcaccgctgtttagcagtacctcttgttttctttagtattagtctattctgttttgcagatatcattcataaaccgggcaaataaatgtttcgtttcctcacatatatacttcctgcaacaaatcctatttcacaatttacagtcaggcacccagaacagcggatatcttaatttctttttccgtttcactgaggtcaaaatcgccgccatcttccacagtcatatgtacctcatacagtacgtcttcggataacatatccggtgtttcaccatcttctgtctggatatgccatttctcttccggaacttccttcaaggtaccatctgtaccatatgcatacagcttcagagaacctgtttccccggagattcctttcatacgtattgcaacggttgtattcggatgtacgttctcaattgtgatcgtattcagccatccttccacatctccctggccgccgtctgccgcaaatttctcctgacttaacacattgcgcattgcctgatccagatccaccttgcggtaaggcatttccggcagatatacaaacctgtcctgaagtctcagaagttccagatagccggtcggacaatagagcgcatttccgctgtttcccgcatacataccgatagccatgttgttgtatcccggtttgtcagaaatatccatggtaaatgcagtctcgcctgtctcaaaatcaagcatgatatactgccacataccagtttccatatcctgaacatatccgtaaatatatcctgttgcagtggacagcttcatcatggaagtgtcagacagatcacttctgcaccagatactcttcatctcatatccgtcctccgtcttaactgtatccacacgttctatacccggcgcgatcattttattaccctgtctcagccagcccacatcataaatattctcatagctttgtattgaggaatcattatctgcttctcccagcttcgcacttcctgcaccaaaccagttacatacgatcgtgcttactgttccctctccatcatcatatacaattgcagaattttccacagacacctgtgtaccttccggaagctcatctataacaggcatgctcgcaacctgttctcctgttttcatatccaccgcaataagatttaccggatcctgattatctgtaaacataaccagatcgttggtcaaagacggggaacatccacctccccatgcaagaccgccacctgtcgtctcatcaccttctttgctttccttggcacccacacttttataggaagtttcccagacttttttcacaccattatccgcctggagcagataacacttcagatttgtcagaatgaccgcaccctccttagatgccgcaataccattctctgcaccctctcccggttccagttcatatacaaacactgcatctgacagatctacatcttctccattcaagatcttatcgatagctgtacgggaaacatatccaaaggttccctgctgttttctgtcaggataaatgcggaagcctcctgttgcaaaccagagatttccctcataatcaaaaactacagataacagattctgatccagtgtttttccaagtgctgcctctgctgctgctttaatatcaatatccagcactttctcaaattccggaagtacatttccgtcttcatctgttgccttcagcatcagtacatggttattattggtcggacacaccagacggttactctcatctacaaaggaataggaactctggatcagataatctccattatcatgctgttttggagaaaaatatcccagtgtctgtgtttcctctgcattaatatcacggattgccagtccaccaagcaacggaactactgcatgtccgtaagaatcaaaaaagactgccggggaagcattaggattaactttttcataagaaacattgatctcagaataaatatcaacaggcaatacctcatctgttgaatctgtattatagcagtcatgatgaatattggaatcacttgctgccatataaggattcacatccataaccttcggtgtaagtgtctttataggcaattctgatgtctgacctgcattttcctctgtctgtgtttcttctacctgtgtttcttctacctgtgtttcctctgcacgtaccatatttattgacggttcagatgttgtagctgctataaaagcgatcattgcaagaattaaagctcttttcttcataattgttttcctcctgagtgtttttgtcatattacatttctgcgttcaaaccagatggagagtccttcttttattttctgctcttccacaggtttcataaaaaaatattctatccgcatcctgaacgcatgaagcgaaaaatcaagatcactgcaccagatgatcccacatttcggatacagggaacggagatgttctgccgcattcagcccagacacacctggcaatgcaagaaacaccactgccggtactgtttttcgtatccgcccaaaaaactgttcctgattctgatagatttcaatcaatggaaaaactttcttttctgtacagtaattcctgatatattccgcacagttctgtccttcctgttcctgatcagttaatatggcaatacaatacacgacatccctcctcttccatttgatgtactcccatttgttatcctcattataaaaaagtcaaaaattttttcaataattctgtcacgaaacgacagaaaatgacacgaattgcaaatccatggtattgttttgtgatatacttatagcagaattttatgatatcagggtcaaaagttcaaaaagtcgttcgtgcttgcacgataagacttttgaacttgggacccgccaaacatgagaaagcagcgatttacgtagtaaatcagcggatttcgaatgtttgagaattgcgggagctgctttgcagcgaagcaattcgtagatatcaagttaggggcaaaataccttttgaccctaacatcattttataaacaaaggaagatttactatgagaattgcaattgttgatgatatttcagaagaacggacactgttgcgaaccagactggaatctcagttttccagacgtaatgtccatatagatatatttgaatatgagaatggagagaccttcctcacagcagcaaaggaatgtccgttcactgtagtgtttctggatatttatatgaatggttctaacgggattgatacagcaaaagaacttcgcagattagacactgactgtctgctgatctttacaacaacttccactgaccatgcattagagggatttcaggtccgggctctccactatcttgtaaagccctacagtgaaaatgatatttccgcactgacagacgaaatcctttcccgcatcccggattccgggaaatatatagatgtaaaggtaaacggcagtaatattcagatcccctttcggaaaataatctacgcagagcatttttcccatatgatccacatccacactgccggtgaaagggaactggtcacccgccagtcctttgattccttcataacctccctgaaaatggactcacgtttctatcagtgtaaccggggcgttgtgatcaatctggagcatgccgttgattttgacggaacaggctttcgccttgataacggaagcaatgtctctgtcagccggaagctgctgaaaaacgccagacagacatttatggaatttctgttccaaaggaggtcctgaaatgactgacatacttcgccctgtacttgaacttttcgtaatcattcccggtatactgctggcatatctgcctgtaaagaactatctgaggcagacaccgcttaagctgacagcatggcttcttccccttcttctgggaatctgtattttgggaggggcagtttgctgtgccctgcaaattcccaccagatggttcctgtttcctctgctgcctgtcattatgctcatttaccataaaacattaaaaatctctgtctggaaatccgtcagtatttttcttgcagtcttcgcagtttttacatgtgtcaaaagtctatcccgggcagtcaatgcacttatgactgctgacctgcatattacagaaaacgaactgtggttgcacactggtgccggaattttctataatgtcatctgcctgctgtttgttctggcagcctggtatcctgcctgccactgtgtacagacaatggtcgcagacgaaaactttgctcaaacttggtatgtattctggattcttccggtaatcttcatcggagtgaatctttttatgattcctaaataccgcggtactttatataccgggcgagtcctgcagtgttatattgttttcagtcttgtactgctcataatcctgcttctgttttatgttatgtttcttatgatggcagtcagcctgaacagaaatgccagacttcagcaggagaaccattttctttcccttcaacaggaaagatacgagaatctctgcatggccattgaagaagcaaggcaggcacgtcacgatatccgccatcattttgtccgtctgtccgctctggcagaacagggtgacatagaaaaaattaaagaatatctctctgctgcaaccggcaaaatctctgactataacctgcatttctgtgaaaatcaggctgttgacagtgttttcggatattattccaccattgcagaaagagaaaacattccttttcatgcactggtttccctgcctgctgatctttccatagatgagattaatctgtgccttgtgttctccaatctgctggaaaatgccatccaggcaagtgtaaaaacagcgcccgcccgcagaaagattaatgtggaagtttatccccaccataatcatctccttctgatccatgtggagaataccttcgatggcaaaatacagcaaaaaaacaatattttccaatcctccaaacgctctggaaacggcataggaatcgaatctgtccgccacattaccgacaaaaacggcggtgcctgtgactttacctataaagatggtattttctctgcaaaaataatgctccggatataatcagttattgattatacccggagcattttgcaaaaatattcaaatatctcttgaagtatctaaaattattccatacactcatccagaattgcagccatcttgtcaatgtgttcttttgtgatcacaagcggaggtacgattctcagtacatcactgcctgcagaaatcaccagcagtccttttgcaagagcagcttttacaacttctccaaccgggcggccctggatcacgattccctgcatgaagcccatgcctcgtcttgttgcagcgcattcatgttttgcaacaatttcatccagtttctgttccagatatggagtcatttcctgtacatgttcaatgatcttatcattctcataaatgtcaaataccttgctgactgcggcacatacaaacgggtttccaccataagttgtaccatgatcacctggctccagagaagctttggcagctttttcgcccagtacaaacgcacctaccggcacaccacatccaagagccttggcacttgtcataatatccggctgtacaccgtatgcctgccatgcaaaataatgtccggttcttcccataccgcactgaatctcatcgaagatcagcataatatctttctcatcacagatctgacgcagaccttccagaaattccttctttgccggatagataccaccctcaccctgaacaacctcagtgataattgcgcaggtcttatctgtgatctgagcctttacgctctcaaggttattgaaatctgcaaacttcacaccacccatcagaggctcaaagggctctctgtaatgagcagttcctgtcacggaaagtgctccgatacttcttccatggaaggaatggttcatggcaatgatctcatgatctgcatgtccgtcacgtacatatgcatatttcttagctgcttttaaagcaccttcgattgcttctgtaccactgttggtaaagaatgccttgctcattttacttgcctttaccagcttcgcacctgcttcgataatcggctcattgtaatataagttggaaatatgcatcagcttatcaatctgatcttttaatgcttcatcatatcccggatagtgatatcccagagaatttacagcaatacctgctgcaaaatccagatattcctttccctcgaaatcatataaataacatccctgtcccttttcaaaaacaacaggaaaacgattataagtgtgaaggatactctcttcggattccttcatctgttcattcatgttcattgtaatatttctccccgtcttctctcagaatcgcagtaccaatacctttgtttgtaaagatctccagcagtaagctgtgaggaattcttccgtcaaggatatggactctgttaacgccttcttcaatggcatcaatacagtttttcagcttcggaatcatacctccgcctacataaccgtcatcgatcagtttctgtgcttcatctacatgaagttcagagatcaggctggacggatcatctttgtctttataaacgccttcaatatcagaaaggaatgcaagcttctcagcatgaacagcctctgcaatggcacatgcagcatcatccgcattaatattataagtagcgaactcatcgtcataacctaccgggaaaataatcggcaggaaatctttctccagaagatcctccagaatcttcggctcaacctttgtaacttcaccaacaaatccgatgtctccgccctctgtctgtttcttgcggcatttcagcagaccaccgtctttaccgctgataccaacagcatttacaccaagagattccaccatggcaaccagttccttattcaccttcgcaagaaccatctctgcaatctccatagtatctttatctgtaacacgaagaccgttaataaatttcggctccataccaaccttgccaacccagcgactgatttccttaccaccgccatgaacgatgatcggtttgaaaccaaccagtttcagaagaacaacatccttaatcacgttcttcttcagttcatcatccagcatggcacttccgccgtactttacaactacgattttacgattaaatctctgaatataaggaagtgcctcgatcagcacctccgccttgtccaaatatttctgattaaccattattctctcctttttccagtcaatgtctggtctccatccctgcttattgcttttcgcaattaaagcaggagacttacctgattcggttaaaatcacccttattcacagaattttgttatgaacgataatccgcattgatttttatataatcataagtcaggtcacagccccatgcagttgctgtggcatcacccatcttcacatcagcgattgctgtgacagcttcctcagaaagaatcttcgttgcctcttcttcactgtaatccacagccacaccattctcaataatctggatcttaccagccttactctcaaagaacagatccaccttctcaggatcaaacttcgcaccggaatatcccatagcacacaggattcttccccagtttgcatcatgtccgtagatagcagcctttgtcagagaagaagtaacaacagacttgctcaatgtaactgcctgctccttagactctgcaccaatgatcttcacctcaaacagtgcagtcgcaccctctccgtcacctgcgatcttcttcgccagagtagtattgatataattcagcgcagccttgaagatttcgtaatcctcacccttctctgtgatctccggattctcagccagaccattggccagaagaagaactgtatcattggtagaagtatctccatcaacagaaaccatattgtaagtatccttaacatcctcacttaacgcttcctgcagcatcttcttggaaatcttcgcatcagtagtaacaaacccaagcatggtacacatattcggatggatcataccggaacccttacacataccaccaacagtaaccgtcttaccgccaatctcaatctgaacagcaacctctttctttttggtatcagtagtcatgatcgccttcgccgcctcagtaccagcctccagagaaccatccagcttcggcgccatcatcttcacaccattcttaatacggtcaatgggaacctgcataccaatcacacctgtagaagcaaccagcacactgtcagcagccaccccaagaatctcagcagccgcatctgcagtctccttacaataaccataaccttctgcaccagtacatgcattggcaataccactgttacagatcaccacctgtgcagacggatgattataaacaatatcctgatcccatttaacaggcgcagccttcaccacattggtagtaaaagtccccgcagccacacatggcacctcactgtaaaccatagccatatccgttctgcccttatacttaatctcagccgcagcagccgctgccttaaatcccttagctgccgtaacgccgccatctataatcttcataaaacctcaatcctttctatataataagacaaactatcttgtttcccgtccacatcctccacgctcagcgactgccgcaaagacatccacatctcttccgtcctgaaaagtcagctccggaaattatttggttttgaacgcatttgcaggggctgtagtaactcttagtgctcgggaatttgcgttatgaggcggctgcatcactgtctgagcgaagtttgcaacggagcgagtttgacaagccacctcatgcctttagcaaattcacgagcacttagagttagtaagccccgaaaccgcgttcaaaaccaaataatttccggagcgtccctttccattaatctatcacggacacatcggcacctgcagtagtccctcagcctccttaaatccaaacatcagattcatattctgcacagcctgtcctgctgcacctttcaccagattatccatagcccccatcataataactctgtgagttctgggatcaatcttaaagttcacatccacataattacttccctccacacacttagtctgcggacaaacatccttatccagcacacgaacgaaagtctcattctcataatacttatcataaactgccttcacctcttcataagaaacatccttagtcagagaagcataagcagtcaccagaataccacgattcataggaatcagatgaggtgtaaaattaatcagcacctctttgccacacgcataaccaagctgatcctcaatctccggtgtatgtctgtgacttgcaacaccataagccttaatattctcattcacttcacagaacagattggcaaccttcgctccacgtcctgctcctgaagtaccggacttcgcatcaataataatggtagacggatcgatcagtccctctttaatcagcggataaatagaaagtgtggaacatgtaggataacatcccggattcgcaatcaatcttgccttcttaatctcctcacgattaatctcacacaaaccataaaccgcctcatcaataaactgcggagctttatgctcaattccgtaccatttctcatatttcttcacatctttaatacggaaatccgcactcaggtcaataactttcgccttggaaagaattccttcattaattaaagaagcacagagtccctgaggagtagctgtaaaaatcacatccacttcatcagctaatgcttccatattatcatccatacatttcgcatctaccagtttaaaaaagttctgataaacatctgcatatttctggtcaatgtaacttcttgaaccataccacgcaacttccacatctttatgtcccagaagcagtctcacgatctcgttacctgcatatcctgtggcaccgataattcctgctttaatcataataatttcctccatcttcgcctcatccggcggtcttcatttcatagtaaaactttactctatcagagtgctggactaattatacatcttacctgcataatatgcaatagtcatttttcaatgtttttacatggattttatttcagttcacggatttccccctgtcttttcctatattatgttgcatatttatgcaaaaacagataaaacttttttgcatttttctattgcatatttataaaaaaaggtgtatattatcacttgttaagcggaatcacacgaaatcatcttgttccgcattgaatatttattcaaaaatttcaatcagaaattaccgcatttattcaaaaataatgcgctgaactcccgacctattcatttactttcggcaaacggatatctcaggaaatttttacaaatcaggaaaataataaaatccaatttcaggaggaatacaatcatgaaagaaaaagtcgttttagcatactcaggcggtcttgataccacagccttaatcccatggttaaaagaaacatttgattacgatgttgtctgctgctgcgtaaactgcggtcagggaaacgaactggacggactggatgaaagagcaaagctttccggtgcttccaaattatatatcgaagatatcgtagatgaattctgtgatgacttcatcgttccatgtgtacaggcaggtgctgtatacgaacacaaatatctccttggtacatccatggcccgtccggcaatcgctaagaaattagttgagatcgcacgtaaagaaggtgcagttgctatctgccacggcgcaacaggtaaaggtaatgaccagattcgtttcgaacttggcatcaaagctcttgctcctgacatcaagattatcgctccatggcgtatgacagacaaatggaccatgcagtcacgtgaagatgaaattgcattctgtaaagctcacggaatcgaccttccattcgatgcaagccacagctacagccgtgacagaaacttatggcatatcagccatgaaggtctggaactggaagatccttcccaggctccaaattatgacaatatgcttgttttaggtgttacacctgagaaagcccctgataaagaaacagaagttaccatgacattcgagcagggtgttccgaaaacattaaacggcaaagaaatgaaagtttccgaaatcatcactgagcttaacaaattaggcggcgagaacggtatcggtatcgttgatatcgttgaaaaccgtgttgttggtatgaaatcacgtggcgtatatgagactcctggcggaacaatccttatggcagctcatgaacagctcgaagaactgacactcgaccgcgagacaatggaaaccaagaagaaactcggcagccagttcgctcaggttgtttacgaaggaaaatggtatacaccacttcgcgaggcaatccaggcattcgttgaatccacacagaaatatgtaacaggtgaagtgaaattcaaactgtacaaaggcaatatcatcaaagccggtacaacttctccatatagcctgtacaatgaatctcttgcatctttcacaacaggtgatctctatgaccaccacgatgcagacggattcatcacactgttcggacttccactgaaagttcgcgctatgatgttaaaagaagttgagcagaacaagaaataattaattgataacagattcagccagatggatattttattcatctggttgtttttattaccggaaacactattgaacttctgtaaaaaatggtgcaaaaaagacacagccagatggccatgtccgtttttatctgctatgtttatgattatctgctttccagttccgcgcgtttcttatcgataagctcctgaagtttttccagctcttccactgtaatcccatcagattccagaagcgcattcatcatttccaccggattgatctttctgcttttggcatttccctttaaataatcctctcttgaaagaagaggggtataatttcttgcatacaccttgccgttcattgaagttcccgcaacctggatcaggttctctttcaaaagaagctccaggcatcttcttactgtcggcattttcagttccggtgcaatgtcattgatctcaaaagcagacaatggtcttccctcttcccaaagcacattcataatatcataacgtttaccttttaagatgtccatcttaagatctccttccatttttaaccagatatcactataatacagaaatatcgaattaattacaattacagagaccttacactgatttacagtccttttacaaatttgttaccaagtttatccggacaataatacatctttctacacatcacgaatcatttcgtcataaaacaagctgttttttctcaagacgggcatatacccactctctgaaaagtgtatagatgacagatactgtcggaatgaagatcagcattcccgcaattcccatcaaactgccgccaagtgttacagctaccagtacccagatggatggaagcccgacagaaccacctaccacatgaggatagatcaggtttccttctatctgctgcaggataaggaaaagtcccagaaacagaactgcttttacaggacttatcataaggatcagaaaaaatgctacccaacatccgataattccgccaaacagcgggatcaatgctgtaaatgaaatcaggacacccaccagcattgcatatggaaaatgcaggattgtcatggatacaaagaacatacttccaagaatcacagcttcgatacactgtccggtaataaagctggaaaaaatcctgtttgccagattccatacatgtgccagatatctgaccggtttttccgggaacattgcgtacattgctttttttatctgctgcaggagcttttctttctgcaaaaggacatagcaggcgaatacaaagccaatggatacattcattgcagtagtcagaagtcccatggtgatggacactgtggaggaaacaatgttattgactccgttcttcagtacgccgagtacagaatcgattatttttcccggctcaatgtcaagagactgcgcccatttcacaacttccggattgtttccgaatacattgtcgatccatttctggaaaaccggaatattttcttctatctttttcgctatgtttacgaatgttgctcccagttccggtactactaccagcataacgatcacgattatacagatcacaaagcagatagaaagcaccaggctgaccggtcttgccagtttttgggctgtttttttctcttgtttcaggacttttccgaacagatgatgttctatgaatttcattggaatattgaggataaaagcaattccgaaaccaatgatgaacggaaagagaaagccaagcagaactctgacagtgctgatgactatgtgcaggttctggacacccagatataagagaattgcgaatgcgatgagccatcgaattttttttatgttttctttgtctagctgcatgtttgtttttcctttctttttgatattggagagtattatatcatattttccccaaaaacggacgcttagaaaaatattttatctgctatgcggtttcggcatctaagagattctaagtcatctgaaatctgctaaaagcatgagaagaaaagtctatgattgctcgctggtgctcaggcaatggacttttcttctcataacgcagatttaagaggactaagaatctctaagatgcctgcaaatgcatagcagataaaatatttttctaagctggtaattggaaggtggaaaatatcgtatcaattcgcatgttaaaagcctacatgaataagaaagactttaaatatgaaagagattgtataagttcacatgggatatcatatactttatataaattctgcctgtaaaatgctttatagactatgaattatcaaatagcaatgcaaaaagaatattaaattaaattgcagaaaggaattgacagttaactacaaatattttataatcattttataaacaatataagtaaacttatatatgtccataatcggttggacgtttctaccaactaccgtaatagttgtctataagttctctccccagggagaaagaatgaggtaaaggcagcatcggtagattttttttgcctttccttaaccacaaaaaggaggtatggttatgaacgaacggacttttgttttaaagggaacaatttgctacagtaattctctgacagaactttccatcactgaaaatggatatttagtatgtgaagatgggcgatgtgcaggggtgtttgatgagcttcctgagaaatttgcaggaatctcatgtacagattttggcgatgagctgatcattccgggactgactgatctgcatcttcatgctccgcagtatacgtttcgtgcctcgggtatggatcttgagctgctggactggctgaatacttatacttttccgcaggaagcacgttatgaagatacagagtttgcaaaagaagcttattctattttcactgaggatatgaagaagagcccgaatacaagagcatgtattttcggaactctgcatgtccctgctaccgagatcctgatggaacagctggataaaaccggaataaaggctatggtcggcaaggtaaatatggaccgtaatggttctccgcagttgcaggaagagagtgctcaggcttctgctgatgctacggttcagtggattaaggatacgcttgataaatttgaaaatgtaaagccgatccttactccgagatttactccgtcctgttctgatgcactgatggagaagctttcggagattcagaaaaagtatcacctgccgatgcagtctcacctttctgagaatttcggtgaaattgcctgggtgaaggagctttgcccgaatacacatttttatggagaagcatatagccagtttgatcttttcggcggtgactgtccgacgatcatggctcattgtgttcattcttcgaatgaagaaattgcccttatgaaaaagcagggcgtttatattgctcattgtccgcagtccaacacaaatctctcctcaggtatctctcctgcgagacgttatctggacgaaggcttacacatcggactgggatctgacattgcaggtggaacttccgtttctattctgcgtgccatggctgatgctattcaggtttccaagctgtactggcggctggttgattcttctatgaagccgctcactgttgaagaagccttttatatgggaacagaaggaggcggttccttctttggaaaggttggaagctttaaggaggggtatgaatttgatgcggttgtgcttaatgacagcactattccaactccactgaagctctctccgaaggacagacttgaaagactaatctacctttccgatgaccgcaatattaccgctaaatatgtagccggaagaaagattctgtaactgcaggaaatacagattctgatggtgtttttccggcatatcgttaacaaaacgatatgccgagacgattgattccaggagtttcaccctgttttttcgggatgattatctgagacaccacaaaacagccggcaatttttaaaatcaaaagggggaaagattatgaatcttgacaaattattccatctcaaagagaaccacacagatgtaaagaccgaagttatggcaggtattaccacattcatgacaatggcatacattctggctgttaacccaaatattctggaagcgtccggcatggacagaggagctgtttttacagcgaccgcactatcatcctttattgccacctgcctgatggcactgctttctaactacccgttcgttcttgcaccgggcatgggcttaaatgcctactttgcatacacagttgttcttggcatgggatacaactggcagcaggcactggcagctgtatttgtagaaggtattatttttatccttttatcactcactaatgtgcgtgaagcgatttttaacgctattccaatgaacctgaaacatgcagtatctgttggtatcggactgtttattgctttcatcggactgcagaatgctaagatcgtagttaacaatgactccactctggtaagtgtattttcctttaaatcctccgtttccggcgggaccttcaatacagaaggaattacagttcttctggcgctgatcggacttctcatcaccgccatccttcttgttaagagtgtaaaaggaaacattctctggggtatcctgatcacatggggacttggcattatctgtcaattgacaggactttacaaacctgatcctgcagccggctggttcagcctcctgcctgatttctcaaacggaatctccatcccaagcatggctcccacatttatgaaaatggacttctccattgtcttcacacttgatttcgtagtcattatgtttgcattcctgtttgtagatatgttcgatacacttggaacactgatcggcgttgcttccaaagctgatatgcttgacaaagaaggcaaacttccaaacatcaaaggtgctcttctttctgacgcagtaggaactacagtaggtgctatgtgtggtacttccacagttactactttcgtagagagtgcttccggtgttgctgaaggcggacgtacaggacttacttccctgatagcagccatcctcttcggattatcactgctgttatccccgattttcctggcaatcccgtcctttgccacagcaccggctctgatcatcgttggattcctgatgctcacatcagtaaccaagattgatttcaacgacctgacggaagccatcccagcatttatcgcgatcatcgcaatgccattcctgtacagcatttctgaaggtatctccatgggtgttatctcctatgtgatcatcaacgttgttacaggtaaagctaaggaaaagaaaatcagcgtactgatgtatgtactggctgtattgtttattttgaaatatatctttatctgatataaatatcagatacacatttacaaaaagaagtctcctgcagaggcttctttttatttctacaatcttctttctctttttacatttatgatgtataattatgaaagtgtttcttcattttcagatcaagaaggcactggcactcttaaaatatatttgaaacattttataactatgagggcactgaacagttacaaaatttcagtgcttctgtccacactgaatgaataaatattttgttttatccacattttatacattctatttacacattaatataaggaaggattacacacatcatgcaaaaacaacagattccattaaaaaattccctgctcctgcttctcgcagcgattatctggggtatcgcttttgtggctcaaagcgtaggaatgaaatacgtaggaggctttacttttaatgccgtccgttcccttatcggagcagtcgttctgattccactgatttttattctgaaaaagagaaactctccttcagattctgcttccaaagcatctggcagatctgacacctcaagtaatactgtatccaatatgcaggagaaaaaaactctgattatcggcggtatcgcctgcggtatctgcctctgtctggcaagcaatttccaacagtttggcatcaagtatacaaccgtcggaaaagccggctttatcactgcctgttatattgtgatcgtccctgtcatcggactgttccttggcaaaaaatgcacgaaatttatctgggctgccgttgcaatggctctgatcggactttatctcctgtgcatcacagatggattttccattggaaagggagatctgctcgtactggtatgcgcttttcttttttcgttgcacatactggtcatcgactacttttctccgaaagtagacggagtaaagctctcctgtattcagttcctgacatgtggagttctttccagcattcccgctctgctccttgagcatccggaactctcatccatcctgacagcatggcagccaatcctctacgcaggtgttatgtcatgcggagtagcctacaccttgcagattatcggtcagaaaaacatgaacccaactgtagcatccctgatactcagcctggaatcctgcatctctgtcctagccggatggatcatcctcagacagcaactaagtactaaagaaatccttggatgtgtcatcatgtttgctgctatcatccttgcacagcttccacagaagcagacagaataatatgtagagtaggtcagaggagctattccctctttcctctttcctctcatcaaactgcatgtgaatttctccttcatacaactatacggctttccagcattcttctttctacagcattgtaccacaccaccattcgttgtaagccttttttcgtaatccttattctgctccatggatatttcaaacagaagatggaaaagaaaaagttattgctatagacgggcattgaagctatgtaacagaaatagtagatgactaactttaaaaaacaaactccccacttcgtcagaaattcatccgacgggggagtttattttatccgctattcaacttctccaatcaccttgtggaagtgctcctttatcctagtaaaactctcatcgctcaggtcatgctctaacttacacgcatcttcttttgcaacttccgggcttacgccgagacgttccaacatcttactcaacactgtatggcgttcataaatatgcgttgcaatctgagcccctttatccagaagcgtcaccgtaccataacgatccatcgcgatatagccatcctcacgtaacagcttcatcgcatgactcacactcggtttcgataccccaagcatcgtcgcaatatcaatagaacgaacaccgcccccctgtttagacaacaccaaaattgcctccaaataatcctccgccgattttctaatttgcattcaaaatacctcccatattgttttgatattaacacaatatgagaaatttttcaatcgctcttcttgagaacagtcgtcattaacccttaaattcctaaagcaatctccatcatcctgttaaacgaagtctgtctggcctccgcagaaattgcctcatccctgaaaacatgatccgaaatcgtaagaatccccaatgcctccttaccggctctcgcagcattcataaacagcgccgcacactccatctccacacagagaacccccatctttctccatgccttcgaactctccggattatctccatagaacgcatccgaagatacaacagaacccacgcgaaccggtgtaccctgctccttcgcaacctctacagcccttgcaaccagttcataacttgctgtaggagcaaaagtccccggcagctgatactggcttgcataatttgaatccgtacatgcactcatggcgatcacaacgtccattacgcttacatcatcctgcaacgcacctgcagagccaatacgaatgatcttctctacatcataaaaattataaagctcataactgtaaatacccatagatggcatccccataccgctgcccatgacagatatctgctcacccttataagttccggtataaccaaacatatttctcactgtgttaaaacataccggattctccagatatgtctccgcaatatacttcgcacgcagcggatctcccggcatcagaaccttctttgcaatatcacctttctttgcactgttgtgtggtgttggaatactcataatcaccctctcctttcccgtaatgctacatcactgcattatttatcatcacctgtaagccgcagcacatccctgatctcttcttcatccatatcaagaatgattgccagctcctctacactgaactttgaactttcatcctcttcatcctctgtaagttcccggactgccgcttccagcttctccacctttgctaccagatagtcatcctcaaatttcctctgtgtctgctcctcgatagcatggcggattccacaccggatacgtccaagcagccatttctcatctttctcttccggttcttcctctcccagagccatcagaaggcttatatttgcctcctgaatcagatcagcgataaaaatctcctcacagttcatttcaaccgccatttcggctgctgcatgcagatacttctgtgacagctctgcctgtgccagagcatctccctttgaaagcagttcaaaaagttcttccgcacttctctctccctgctcctgttcttcaagaccttccagatattctttcagatatgcctcttcctccgctgtcagaggaactttttcttctttttcttcggatacttcttccgggccggtctgagatgctgctgaaatctcctccgcaccttcaatggaaataccttttaattttaaatactgtaatatcttgatcagctgtgacttgtccagatcaagttcgccaaaacattcctttatctgttccggtttcaatactttgccattcttctctccaagttcacatacttctgtaagtttctgctgaaatttctgtatatccatagtcaaaatctccctgtcctgtttataacttaactatacaacaaaaaactatgcctgtaaaacaaaaaagcaccgttttaaccggtactttttctaaatgcggataacaggacttgaacctgcacgggaagcccactggtacctaaaaccagcgcgtctgccaattccgccatatccgcattttctcatattctcagagtgtacctgaaaaatcattctcgcactctgcaaaagcaataaaatagcggaaacctcacagaagatttccgctattaatgaagcatcggggattcgaaccccggacaacttgattaaaagtcaagtgctctaccgactgagctaatgctccatataaaagactgggctagctggattcgaaccagcgaatgcagcagtcaaagtgctgtgccttaccgcttggcgatagcccaaaggcgaagggtggatacagggattcgaaccctgggcctccagagccacaatctggcgcgctaaccaactgcgctatacccaccacagcgtgcctgaagggattcgaacccccgacccacggcttagaaggccgttgctctatccagctgagctacagacacatctctctgtacatacagagaagcgggtgatgggaatcgaacccacgtatctagcttggaaggctagtgttctaccattgaactacacccgcatttcgctgaaacggtaatgttgttgttacagcagtcggggtgacaggattcgaacctgcggcctcctggtcccaaaccaggcgctctagccaagctgagccacaccccgctgtttttctttatttatttgtgcttcgttgtccgacgcaagacatattatatgttaagcaaccccaaatgtcaacaccttttttcaattttttttgattttttttaaaaaagtgattttttatccctcaaaaagtccctgaaacccgctaaacacaaggctttgcgggcttttcactttttttaaaaaaatcgttttttttgttcgcaaaaagggattttttactggtttttgagattttttttaaaaagatatttttttcatacaataaaaaaatcttaactttttttattttttcttctgtttttttactgtcacatatctgcaaaaagaggtattgccgttatccgatcaacaatacctcaaaaatatactgtcagatgagtcaggcggatattcgcaacctccgcaagtaacttacctgattcagttaaataatttttcagaggtatctgatctcgacctgaggatcttttccctcttctatctgcataactgcatagcttggcctgcggcctctctgacgcgggtaggtaagactgccgggattaattaccagaatcccatcctcattctcgatcacaggcatgtgagtatgaccatacattgcaatcttacatcccttagcctgcgcattctcaacaagtttatcataatcccgggacacaaaatagtgatgtccatgtgtaaccagtatcttatgtccctccagggtaacttcttcatcatagggaagatctgtaaaaaagtcattatttcctgcgacaatcgtacatgggcactctgccagtgcctcaatgaaaatctctctgccttccacatccccgcagtggatcagataatcaaagggagcttctctgagcactgtctcttccagattctcatcctgtccatgagtatcgctgacaatcagtaccttcatttcagttcatcctttatggcacgtaatgcttttcccctgtggctgatcttatttttctctttgccggaaagctctgcagaagtacatccatattccggcaggtagaagatcggatcatagccgaagccgttctctcccttctcctcatagcctatacggccttccattgttccacgcactgtttttacacttccatccggaaaagccgctgcaacggcgcatacgaaccttgcagtacgcttctcgtccggaactccgttcagtctctctatcagacttgcatttttgatatgatatgaggtatcttctcccatataacgggcagaataaatgcccggctctttattcagatagtcaatctccagaccggaatcatctgccagagtgatctcccctgtcagttcgcagatagtcttcgccttgatcacagcattttcctcaaaagtagaaccatcctctacaatatctgcatggattcccgcttctttcatagaaacaacctctacatccatatctgcaaggatctcgcggatttctctcattttatcctgatttccagtagcaaaaattatttttttcataatcctttgtatcctctttttattttgatttttcgcaattacagaagcactcagctacggtttttcttcggtgggcgcggcccaaggaactgatagtaataggtcttaagcataccattatagatcttacggtttttatctgcttttcgcccgatatcgttctccgctttctcataagatgtgatcagatacatggaccacttatcaagcctttcatagctttccccgatttcacgataaagctgagttaaattctctttttcttccagtcgttccccataaggagggtttgtgatgatgaatccatatggtttgggatggcggagatcttttaccgctctctgctggaaatggatcagcttgtccacacctgccatttttgcattagctctggcagccttcaacgcctcaggatcaatgtcaaagccctggatatctgtttcaatattaagatttatcctgtcctgtgcctcttcatttgcatcataccagcattttctcggaaccagatgcttccattcctcagcaaggaaggaacggttcatgccgggtgcaatatctgctgccatcattgctgcttcaataggaaaggtaccgcttccgcagaaaggatctaccagaatcctgtctttattccatggtgtaagcatgatcagagcagatgccagtgtttctgtgatcggagctttcactgtcattttacgatatcctcttttatgcagagatacgcctgaggtatcaataccgatcgtggccacatctttcataaatgccacgcggataggaaagcttgccccatcctcttcaaaccaggacaccccgtatacgcccttcagacgctctacaatggcttttttcataatggactggatatcagacgggctaaagagcttactcttcacagaattggccttggcaacccagaatttcccatccttgggaatataattttcccatggcagggcttttgtcttttcaaaaagctcgtcaaaggtttctgcctttacttctgctactttcagcaggattctttctgtggaacgcagaaagatattggcatctgcgattccctgtgcatctgcctcgaatgttacttttccatcctctactttggtaatctcatagcccagatcaaggatctcacgtttcagcacagcttccataccgaaatgacatggagcgatcagttcaaatttttccattctttatcctttctatatgtagatgggacttccctataattctatgctcttaacaatatttccctcaaaatccttaattgtaaacacaccgtcctcaaagatcgcatatgtaggcgggtttccttcttttggaatggaaacagaacccgggttgagaagtacatagccttctttctgctctgctttcagtacatgggtatgtccatggatcagaatatctccttcctggatcggaggcagattattttcattgtaaatatgcccatgtgtggcataaaaggttcttccatccaggttcagaatacagtagtctgccataaccggaaactgcaggaccatctgatcgacctcagcttcacaattcccacgtacagcataaatttctttcttcatgtcattaagcatggaaatgacctgtttgggagcatattctctgggaagatcatttctcgggccatgatagagcagatcgcccagcagtaccaggcgttctgccttttcttctttatagacatccagcatttttctgcagtagtatgcagaaccatggacatctgatgcaaacatatatttcatagttttgtgtctcctcttttatagtgtgccgacgagttgattcttgaaacaatcttgcaggataaatttttttatttcaaggcggaggaaggaggcgtagcggtggctacggcgaccgacgacaacgcggaaataagaaatttagacgcaagattgttcgagaaatcaacttgttggcacaataggtatgccgacagattgatttctgaaataacctgaagatataccggttcgtattttttctcttacaccttatcatgcttatggcgaaattacaagatttcttccccgatatgctccaaaaccgcctataacagacctggtacagtacccaagctttgcaagctgccttgcaagcagaaggcttgccccgcccctgtcgcagtacagaaccagtattttcccttttggaaaggctgtatatccgtctatttctccatatggcatgtttacggctccttttacatgactgtgcatataagactctttttctctcagatctatgatcaacgtgtcccttcggcccacataataatccagcatttttgcagaaatcgtttccaccggaaacatggcagactcctttttgttatatcatatgatatcagggacagatgtgccactgcctgacaaaaaacagccgacacataaattggctcacagcagatcaggaggggcattttcccctcctgatccaatcaatatctgtcttcttctgagctgtaagactgggaagttttattttttgctttacttctacaatctgtctcgtttttgcttttcacactgttttttgcattaccagcatggttcatttcattaccatagctgttcttatctgaagttcctgtgtaatttctgctgtttttactctcagattcatagttttttgccattattattttcctcctgatgagatttatctgcccggatctcctgatactctgcaaaatccggtttttttcttccacacttcatcgctgaaagtgcttcacattgactattatcccaaaaaccggggggaatattcatcaaaatatgttgcttttttcaccaagctatattataatcatagctgtaaaaagaatttacccttcaaaaattttttttacataaaccccttatttaattatttatactccccttgaaagtcccggcagctcccctgccggggctttctctttgtatttattcggctgcgaatcacttgataacaatttcagaaaaactgcaaaaaacagcatcgccggtctcatgatctgcgatgctgctctgttttttatattcttcttttcctattcattttcatatgcgccggcaaacagtttgtttctcaacatttaccagatttcagactctactgctgctctttcaatagaaagacctttcatatagctgtccataaatgcattgaatccagccacaccttccggttttggatccagtgtgctgctttcctgatctgcaaacactttattatcaaggaagctttccagagtctcaccttcttctttatttaccagataagaagcaagaagtgcgattccccaggctccgccttcacctgcagtagccattacagataccggtgcattgacagcatctgccagaatctgctgtcctacgccttttgtcttgaataatcctccatgaccaagaagacggtctacttttacattttctttctcaaacagaaggttcagacctaccctcatggctccaaggcatgtatacagattggttctcataaagtttgcaagattgaatttgctctcaggagaacgtacaaataacgggcgtccttcttcaaagcctgtcatatgctcgcctgagaaatagcagtaagacagaagtccgccacagtccggagcaccttcaagtgctttattataaagagttccaaacagtttattcatatccacttccatacccatagcctctgcaaactctttaaatacatttacccaggcattcaggtcagaggtacagttgttggaatgagccatagctaccagatgtccggacggagtggtaaccatgtcgatttctttatacggtctggagagttctttttccagaacgatcatggcaaatacagaagttcctgcggaaacgttacctgtacgaactgcaacactgtttgtggcaaccatacctgttcctgcatcaccttccggagggcacatcggaattcctgctttcagtttacctgtcacatccagaagtttcgcaccttcttctgtaagaacaccggcatcttcacctgcaacaagggctttcggcataatatcgcgaagtttccatgagaatccataaggagcaaccagttcatcgaatttatcaaccatctcctggttgtaatctgcctttgtggtatcaatcgggaacatacctgctgcgtcaccgataccgagaactctctttcctgtcagtttccagtggacataagcctccagagttgtaatataatcgatatcttttacatgttcctcgccattaagaattgcctggtacagatgtgcgatactccatctctgaggaatattgtaattaaacagctccatcagcttttcactggcttcccctgtaatattatttctccatgtacggaatggtacaagaagttctccctctttgttaaatggcatatatccatgcatcatggcgctgacgccaaatgcacctacagattccagttctatgtcatattttgccttcacatcccttgccatatcctgataacagtcctgaatgcctgtccagatatcatcaaggctatatgtccagacaccgttttcataacgattttcccattcatgaccgccagatgcgattggctgatttttatcatctacaagtactgctttgatcctggtagaaccaaattcaataccaagcgctgttttgttagcgagaatcgctgcttttgcttctgctgctcccatttttatgtacctccctgtttctctgttatttatgattacagatcattcgacaatctataatcatatattgtttgtacaccaatattattgcatttcttttattgttttaccatggaaattttacggttttaacatactttttattactttaaacttctcagggctaccatcccaggcagttaatttcagcctgatatggcagcctctgtattaattacaaaaattattattttctgaatgcaagttcattccatctcagttcattcttaaaatcacgaatatttgtatctttatcaatgtaaacagcttcaatacccatagctgctgcccagtcacccatctgctctgctgtcaggtcataggagaatgctgtatggtgggctccgcctgcaaggatccatgcttctgcacctgtcttaagatttggctgtggtgtccagaatgcacttcctacaggaagcttcggcatcggtttctcaaccttcttgcattccacatcgttgatgatcagacggaaacggtctccaagatcgatcagggatgttgcaatacccgggcctgtcttgcttgtgaatacaagtcttgcaggatcttctctgtcacccatggaaagcgggcatactttaatgccgatcttaccatctgcgacagacgggcatacctcaagcatatgagactgaaggattccttcttttccaggtacaaagttatatgtatagtcttccatcatggaagttccttttgcatcttttacaccagctgtcataatcttcatcagacgaaccattgcagctgtcttccagtcgccttctgcaccgaatccatagcctttttccataagtctctggattgcaagtccaggaagctgtttaagagcacccagatctccaaagtgtgtaacgattgcctgataatttttctcttccaggaatttctcaaatccgatctcaatctgagcctgaactgctacatgacgtttaaattcttccggatctcttccctcaagaagaatatcatatttgctgtagtattcatctaccagcgcatctacatcacctttagctacatcttttacataatcagcaatctcatttacaggataagcatcaacttcccatccgaatttgatctgtgcttctactttatcaccttctgtaacagctacgtttctcatgttatctgctacacgacatacgcggatatgactgctctccatgataccaactgctgtacgcatccaggaagcaagtctttcctgaacatctttatctgcccagtgtccgacaataacttttctttcgattcccattcttgtaacaatatgaccatattcacgaccgccatgagcagactggttttcattcataaaatccatatcaatggtatcataaggaatctcctcattaaactgtgtatgaagatggcaaagcggttttctgtattctttcagaccaaggatccatgattttgccggtgagaaagtatgcatccatgtgataacacctgcacagtcctcatctgcatttgcctcattaaatgttttacggatcagttcgtttgtgatcagtgttggtttccatactaattcaaatggaagaacaccactcttgtttaattcctcaacaatgattctggaatgctcagcaacttttcttaagcactcatctccgtaaagatcctgtgaacctgtacaaaaccagaacttatagtttcttcctgttttcatgataaaattcctcctggatttattttttatttatttcatttgtttacaatatttttctgcatgatccccgtatgatcagttccggataaatcagtctttcaaccttactttcttcttcaggaactccgttgatcttctcaagtataagctctgctgccatttctcccagcttttcctgcggatgagctatcgttgtgattccgcttcctcgctgagcatacagtgaattgtcataaccggtaatggaaatatcatccggtatcctgactcccattttctccagttcttccataacctgaacagcaatctgatcattgtaacaaacgattccatccggaagctgtccgctctgtaccatttcttttgccatcagtgcaggttttactttcctgtcctctgtatgaaaccagacaacatcatcaggatcataggcaatccctgactcctgtaaggccttcacatatcccttgtggcgctccagtccctgcatatcgtctgccttaaagaaacccttgatctttttatgtcccagttccagcagatattttgttacaagatagcctccctgtgcatcatccataagaatatgaggtttatccctcatttctgaatagattccctgaataaacacatacggaatttcaaatttatccagattctgataaagatttctgtgtttacagatcatctcacttttgcttggttcaatgatcagtccatcaatatctttcttcagaagttcctccagacatctggcctctttctgtctgctgtttgctgtgtttttcaggataatactgtaaccgctttctgaaaggacattatccattccctgtatcagtctcggaaaaatataatcagaaatatatgtggtcactaccgcaatattctttgaattctttatatggcgcatattctcagagcaataagtacctcttccgtgaaatgcctctacatatccgtcctgctccaggattcccagtgctttacgaactgtatgtctactcagggaatatttctgtgaaagctcgttttctgaaggaagcttctctcccggtcggatagctcctgacataatatcacttctgagctgttccatcagtgagaaatatttcggctttccattatctgtcatgtcttcttccctcctgtatttaggatacaacttgtacgcacgtacgaacaagttgttttttatgcataaattatacaaaatatcgggagatttttcattagttttttccaaaacgcctcgagagatagtgatgtgtgaacagtaacagttcatcctttacgaaagttaccaatatccgattgatttcaacatcacttcggctcagctttttctataccataacattcatggcaaatcccatgtaccgccatacgtatttctttatccagacgtgaattacaggtgatcagagtcaccattctctccctttcatcaggctctactcctgtgtcatacatggaattatttttcaatatagataattgtctcctgtatgcaggactggataacttgtatccatattcaaatgccgggcttttggaagatgcctgttccacagaaaaaattttgtacagaaactttctttttggtgttgtgatctcaatttcaggacattttttcagaaattcaggctgttcataacggttcagatttgcaaacatcatattaccttctatattatgcccgtaaagaatactgtgggaatctgtaaaattcttttttatgtcatgttccagaaaaatacatccaaacagatcttcctcttctctgaaattatgtttcaggtaatattcatcatccgccgcctgaactacaggataagaaatatcggctcccgggacagtaatccaggcaactgtctgagagttgatctttcttaaattttcccaggaaatcccgaaggattccctgatttcatctgtacagtttttgttttttgattcagaagatcttctctgttttttcctgcgttttttttcactgttttttgtactgctgtcttcatcagtttttttgccatctgccaataatccggcaccttctctgttcttcacccctgccatttgggaaagctctgcatattcctgccttgctgcaagattctgttcataactttttatatagaaaccggcacaatatataagaagcccaattgctgctatgatcatacttactgcaaatgttctgagttttttcatttccgcggcataccctttatatttcttttcccggaaacagttcttctgtagatcaccacacctcctgtcagcagtcccattccgataagtccaagaacagccatcattttaaacggtctgacatctcctgttttagaacttcctgccatggaaccaccctgatagcttccgtatccacccgaatttccgtaactgctgcctccgtttccggaagttgtgcctccattatttccaccattgtaagatgccaacggtgctttcgtcggtacaggagtcattttcgggcaggttcccggtacagatggtgttggtgtggcttttggctgctccgtcggtttcggtacttctgtaggttttggtgtctctgtcggctttggtgtttctgttggtttcggtgttgcagacggtgttggtgtggcagtgggttctgcttttgttttcacatatacctcctgctgcgccgcaatttccggtgaaatatctcctcttgctttcgctgtgtttacaattttttcaggctctgtgctttctgttttaaataccacttcatagcagacttcaattttatccatatctgacaacgatgctcctgtctgaattacaaatcctgtatcatctgcctctattttggcatctttcagctctatgccgtttttcttcacaaaaatgctgtcttttacaatagaagccccttgggtttccagtttatcttcgataacaatattctgatctgtgacatcctcacgcagttgtcttactgtcagcttatagtatcctttctcaccggacgcatactctttcttatctgattccttcacaatttccagaatcggactgtgtacctctgtctctgtttccccggttgcaggtatcttttcactgctgtctgcaactgcagtattgtgcactttctgtcctgccagggctgcatcaatcactgctgcctgatattccacgatcatacttttctgttcctgacagtccagaggattatacattacctgctcaaaaagaccgcctttatcattatcgcagatactatatctgctgtccctgaccagtgtcctgcctgttgacatcaggaaagtattatcatcattgatctgtacatcagcatctgccacatttcctttctcatccatcagaatcaccgaatccttcagaagacgtactccctgagtatcgatcacatcctgcagagtaacattacgcgccacacatccggtctgctcctgtgtcaggacaatgcggtatgtaataatatcaccatatttgtaaaatggtttgtccgtcgtcttctctacgttaagaacaggcgagttcacccagatttttgaggagtcctttactttctgtgcattatctgcatacgcctgtgctgtatttacaatctccatcccatttacgctttcctgcgcagtacagcggaaattaacagtcacaggtgtctgatacggaagatctgaaatcgtcacgatccatccggttccctgacgtgtaacctgacagctgaccggtttttccactgtttctttataattttccggattcagctgatttcctgcatcatcagttcctgccaccggattctgaataacagccggaacaccgcttacagtaacagcatcttcagctccgtccagagccagcccttcaggaagggaaagatcactgatcacaagatttcttgcgatagatcccttctgaagattattaaccgtaacctgataattcacctgttctcctacccgaaattcattttccgcacgtccgtccccggctgccagatatggattctgaaaacttttctcaatagaaagaactgctgtatttacatacacttctgcgtcatcctgtgaaacaggggcattctgcgcctgcacattggcaacattaatgctttccattccatttgccgcttccgcaactgtgcaaaggaaagaaatcataaccggagtatttgccggaagatctgaaatgttcagtctccatccgcttccctcctgaagaaattcataattcaccggtttctctgatgtctcattataaaattccggattgagctggttcaaaacatctttggtccctgctgtcagctgcgtaatattctgtgggattccgcttaccgatacatcctctgccgatgaaagcgcaagtcctgccggcataccggtatcccagacagttacgttccgggccactgtacctgcttttttattctccaccaccacattgtactgtacctgttctccgacctgccattcataatgatctgcagatttctcaatccagaattctcctgaatttacatatacttctgcatcatcagatctctcatctgtattagcagcttttacagttgctgcatttacgctttcgtgtccatttgcctcttcctgtgcgatacaatggaaaataatcgttacaggctgactgtatggcacataagaacaataaaaggaaaatccgttctcatctgcattcaactgagaatccacagatctcgcttcatatgcctgtcctgttttcttatccggtacgggatagtttacctgttgctgaactcccagtacttccatgctctgtgcaccacctgccagaaccagtccctgcggcagaccaatatcagtaatagttacatcttttgcaattgttcctgccgttacattattcaccacgatccggtaagctacctgctctcctgcctgccattcatatttgtctgctgttttatcaatttcaagctgtggactgttcggccatacttctgccatatcctttctggattcctgttctcctgtctcaggattgatcagattatccgctgttgcagtcacaatattttcccattcctgtccattggaatccgcagatgcctgacatttaaaacggattgtgatcgtctccccatacttcagggacggacactctgctttccatccattttctccctgtccggtaagcgtacagttctcgcctccctgacttgtctctacagcatactgcccttccagaaactgcagacatgatggaagctcgtctgtaataacaacatttactgcttttacatcctgttttgtctgagaaaccagaacctcataatctatgatatctcccgttttccattcatactgagaagtatttttctttacttccagttccggtggaatcacaccctttacccacactgtttccgtatccattgtatctccgcttccgtttgtacgttcataactcatggatgcatggtttggtacaagaatactgtatccatcctctgcaaggtattttgaaatgttaatttctgattccggtctctggcgtacttttaaagtaaatgtgtaagtctgattatctgtaaatgcttcatcctgaaggctctctgctttggccctgcaggtcactttctgtccttcaacagcaacatcaaaccagtctgtcactgtctgccctgcatcattcacaatactgacttttgatgcatcctctatagtaagacaatcctcaagtatatcctgtaccacaaaggatttcagtctattgggtgtcacctccgcccggatcatatactggaattcctgtccctgacgaatgccaaaaggtttttcttttgatgtggcagctgcctgttcccatgtacagtttgcctctcccacacgtttctcaggcgcttttttcatctcaacatcaccgaaacaataggatgtaaaatcaaaatatgcatatgctttgcagtatttctgtcctttaaagttcggacaataactgttgcctgatggatccagatatttatttcttgtaatctctgcccatctttcctgagaaccggcttttgcaatggcatcttcacgacttttatcccatttatccagtctgaactgatgacagaattctaccgtaaaattatctgtatcataaaaaagattcagccatcctctcggatcatccggctcaacggaaccaaggggtgagcttacagaatttccatctaccgtcagataatcattgtttttcagaacatatgcattatccagactgctgtctgacggaatacggactccctgtcccgcatcaatatcacgtatggttccatggccactgatcggcagtgtttcttctgttccatgcttcagaaactgaaacttaacctttgcgtatcctacagaataaataaatacaccgatactgtttttggaaaagccaaccattggataagcttcattatctttccatgcaaacgtagctccgcctttattctgaacaatcgattctgcagtgcgcaaatcataacggggttctgcattctctactcccacaagaatgagtctgacatcaacaatatttccatttccatcttttcctacattgttataacgcatccctgcgcttccggctttatagtccgctcctacacgaacgcactctgtgtcacgttcgctttttccattgtctgaaaaagcttccctgtccagattatcacacccaaaagattcatatgtggtaattccgggctgaaacttcatgttaaagcgataaccataatctaccaccttgtcactgtcccatgtttctacagttaacggtgccgcctgagtttcgcagacaggcacaagccccagaattgcctgcagaataaaaagtattgcaagcagcaaagctccaaggcgttctttcagtttgaaattgtgtttcattttccgtctcctttccgaacaaaaaatataaaaatgaatgtgggatttttccctgcacctggcaggattaaagaatagaaataagttgagattgtatgattataaatattcaaggggaattaatatcgtgaaacaagaacgtttacacttaagatttttaagattctgcgcagggtttcttttctgaaaccctgcacagattttcattgatcatttcttttcttcagccatgaaagaaaataaagaataattgcaagaataataaaaaacggaatcgcaactccgattatcagtatcagtaaaacaattataacagccgccgctgcaataacaacagccctgccatgccaggtagaaagatcgattacttttttccatcttttctcctgctgatgaggaagctctgtctcattgccataactgcttccgtaagaagaatactctccgtaatcttcctgtgtacttccatcatctgtatcgatcagagtttttgctatcagatgcgggtctcccagttcctgcagtacttcctgctctgaacgtccgccacgtacctgagactgtatataatcttcataatacctgatatgtgctgctgctttgccctcctgcatctgaccggcaagctggcttctcaggatttccaaaaattcttttctgttcatcttctacactccattttgccagaaatacatgtcaaaactctactgctcgctccgttatcagtaacgttcgtactcttattttaccatatataccgcaggtagcaactaatataatcataaactttttatgaaattcttataaactcagttactgttcactccgttctcagtaactgagccaaaattcattccagattgcctgcggcaatggaagtttggcttgtatgtcatttcccgacaatttttgcatacatctccggtctgcggtctctgaaaagtccccagttcagtctgtctgcctttaatgcatccaggtcaaaagtgcttacaagcaccccctcttcccctccgggcagttctgcacagagagcacctgtgttgtctgtgataaaagaagagccgtaaaaattaagagcagatttctgcattccgttttccggacatggctctactgtttcctcaccgattctgttggcagcgatcacagggatcaggttggaggcagcgtgtccctgcatacatcttctccagtgttccatgctgtcacattccaggatgggttcacttccgatggcagtgggataaaagagaagctctgcgccctgcagtgccatacatcttgccgtttccgggaaccactgatcccagcagattccaactccaatggttccaaatctggtatcaaaaaccttaaagccggtatctcccggtgtgaaatagaatttttcctgataataatggtcatccggaatatgtgttttccggtaaacgccgagattcttcccatctgcatccagaaccgcaacgctgttataggtattattgacctctttttcataaaaactgaccgggatcacaatccccagctctgccgctaccctgctgaaatgacgcactgcagggttttcctctgcagtctgcgcatattcataatactcatatctgcgctcctggcagaaatagggccgttcaaaaagctccggaagaagaacaatctcagctccctttgctgctgcctgacgcaccagttcctctgcatgggcaatatttttctccacacttttactgcatttcatctgaactgctgccactgttacatttctcatcctgtctgttcctcctgctcctgtttacataagtaagttttttcataactttcaggtaataaccctcaaacacatgactctcaaagttttctgcatcagggtcagatattttttccgggaatctgctgggtaatacagtgaatatttccaccgccgacaatgatggctctggcatcaatgggataaatccttctttcaggaaaacacttctgcagaatctccactgcccttttgtcattttcatccccaaattgtggaaggatgatccctccattggaaatatagaaattcacgtaactggcagccatccgttctcctgcttcccgttcgtcttctccctcttcaaacacaaagccatccacatcttcctgggtaaggcagaccggtttctgaggaatcggaagcttatgaatcttaaattttctgccttttgcatctgtttcctgttccagcaccttcagatcagccagcgacatggcatactgcggatctgtctcatcctctgtccatgcaagcacaacctctccgggccttacaaaagcgcacacgttatccacatgctcattggtttcatcctgatagattccacatggaagccagataatcttgtggacaccgagccagtacttcaactgttcctctatctgttccctgctcatctgaggattgcgtccctgactcagaagacaggcctctgtaacgatcagagtcccctctccgtcagaatggatggaaccgccctcaagcacaaaaggtctggcatccagacatggacaaccaagagtcctgcagataaaggcagccaccctgtcgtccttctcccagttccggtaaagtccatcaaagtctcctccccaggcattaaactgccagtcaactccacagaccgcccctttctcatccagaaccatggttgctcccacatctctggcccaggcgtcatctgtctcgcattccagcaaagtcacaccggaaacattcccaagctgattctttgcattctccatctgagctttggaaaccagcatatacaccttttcgctctctccaatagcctctgcaactttcacaaatgctttctgtgcttcccttgccccataattccaggaaccgggacgttccggccagatcatcacacatccctcatgaggctcaaattctccgggcatacgatattttgttctgttcttctctgtaacttccatgtctgtctccttttctttgatagcccggcagatatcaggaaagccggctcttaaagtcttcgtatccgaaatgtctgataacctcacactctccgtcctcatgcataaccgcaatatccggcagcggcataccgttaaatgtattattcttcaccatagaataaatcgccatatccataaaatacagcttgtccccgatccggatctctctgtcaaaggaataatctccgattacatctcctgccaggcaggtgcaggaagataagcggtaggtatatgccttctcccctgcttccccgctgtccttaagaggcggacgatagggcatctccagcacatccggcatatggcaggctgcagaagcatccaaaatcagcgttctgatctcattttccacaatgtccataacctctgtcaccagatatccggcattcagggcaacagcctccccgggctccagataaatatccagatcataggtttccttcatatgctgaatacatttttccaggagctttacatcataatcctctctggtaatatgatgtccgccgcccatattcagccaggaaacctcagacagaaattctccaaacttctcctctaccgcctgcaatgttttctccaggtcatccgcattctgttcgcagagcgtatgaaaatgcagtccgtcgatccatttcagacattccccgtcaaagttctctctggtaacccccagccttgaacccggcgcacagggatcatagatcgcatgatccccctgagtggagcattccggattaatacggagtcccagactggctctggtacacacttctttaaatttcttcagctgtgctgtggaattaaagataatatggtcacagatacgatccagttcctctatatcttctgtacggtaagcaggggaaaaaacatgattctctttccccatctcttcatatccaagccttgcctcaaacagaccgctggcagtggtacctgccagatattttccgatcatgggatacagagcaaagccggaaaacgctttctgcgccagaaggatcttacacccggtatcctcctggacttttttcaaaatctccagattctcccgcatcttcttctcatcgatcacatagcagggagtttgcagttgatcaatcttcattggctttccagacctttaccagttcaggatcttcgcagactttccatggaagtccccatttgttcagtgcttccatatatggatccggatcaaattcttccacattaaatacacccggcttcttccactgtccggtcactaccatcatggaaccgatcatagccggaacacctgttgtataggagattgcctgggattccacctctttatagcattcctgatgatcacatacattataaatataaatacttttctcttttccgtccttaacacctgtgaaaatacagccgatatttgttttacccactgttctcggacccagagatgcaggatccggcagaagagctttcaaaaactggatcggcacgatctcctgtccattaaattccacaggtgcggtggaaagcattcctacattttccagacatttcatatgtgtcagatagctctgtccgaatgtcataaagaaacggatcctctgtactcccggaatattttttgccagtgattcaatctcttcatgatgaagaagatacatatccttctttcctacctcagggaaatcgtagacagatttaaattccataggctctgtttctacccaatgtccgtcttcccagtaggaaccatttgcggaaacctctcgaagattgatctccgggttaaagtttgtggcaaaaggatatccatgatcaccgccgttacagtccagaatatcaatggtatggatttcatcaaaataatgcttcagggcataagcactgaatacactggtaacacccggatcaaaaccggttcccagaagagcagtcagtcctgcttccttaaatttctcatcataagcccactgccaggaataatcgaaatatgcagtaaagcctttttctttacatctcttttcatagattgcacgccatgtgggatcttctgtatcctctgcttcataattggcagtatcaatataatccgcaccggcttccagacatgcatccatgatggtaagatcctgatatggaagtgccacattcaggacagcatccggcttataggctctgatcaattctgcgacctctgctgcattatccgcatctacctttgctgtctcaatttttgtcttcgttgtactttcaatcttctctttgagtgcatcgcatttttcctttgtcctgcttgcgatcataatctctgtaaaaacatcgctgttctgacagcatttgcgaattgccactgaagctaccccaccacatccgattaccaataatctgctcataaactgttttcctcctcttccagtaaatcttctacatattttggaagcataaatgctcctctgtgaaggtttgttgtataataccatgtttctatattaagattatcaaacctctccggcctgaaatcttccagtggatgatatttctttgatgcaaatccaaaaagccagtatcccgagggacaggtagggatatgtgcctgataaaccctgctcaccggaaatgaccggaaaacctttctgtgcatctttctgcattccacctcatcctcatcataaaaaggacttccatgctgataaaccatgattccgtcatctctgagagccttataacagcttccgtagaattcctttgtaaaaagtccctctgtatgtcccagcggatctgtggaatcattgatgatcaggtcatatctggcctttttattccgcaggaaccgaaggccgtcttcataataaatgttgactctctcatccttcagtccctgggcaatatccggaaacatctccgcacatacatccacaaacattttatcggattccaccacatcaatgctctcaatctgtggataatggatcagttctctggcaactccaccgtcaccgccgccgatgatcagaacattttttacattgggatgtactgtcattggcacatgcgtgaccatttcatcataaataaattcatccttgtcagaaaatacgatctcaccgtccagagccacaaatcttccaaattcttcagactcaaacacatcgattctctgaaattcactttcccctgaaaataactgtcggttaatccggacagaaagctttacatttcctgtatggaactcggaataccataattccatgatcagataccccctttcaggacctgaagattttctaccttcggatcctccattccctgcatggaacagcctttgtctcttgcataaagaatgtattctacaatttcctgtgtcaccatttctccaggagcaagaatcgggattcccggaggataacacataacaaattcaccgctgatcctgcctgccgcctgttccatgggcagagattctttctccgcataaaatgcctgctgtggagacgccaccactgcaggtgcgatatattccccggaaagcatacctgtgctgtccttcttatacagacgttcaatatcagccagtgcccctaccagtctctcaatatcctgaagcctgtctccgatggaaatgtaagccagaatattacagatatctccaaactcaatctgaatatcatattcatctctgagaagatcataaacttcaatacctgccagcccatttcccagtgtataaatggagagttttgtaacatcaaaatcaaaaacactggttccattgatcagatccataccatatgcataataaccgccgatctcattgatctcctctctggcatactgcgccatccctgcaaccttttcaaaggcttcctctcccctgagtgccagatttcttctggagatatccagactggacaacagaagataagaagcgcttgtggtctgagtcagattgatgatctggcgcactttctctgcattcatactcttattcaaaagcagcagcgaactctgtgtcagacttccgccggatttgtgcatggaaactgccgccatgtcagcacctgccgccattccggatacaggaaggtttctgccgaaataaagatgggttccatgagcctcatctgccagcaccttcattcctcttgcatgagccttctttacgatagtccgcagatccgaacagattccataataggtagggttatttacaagaactgccaccgcatccggattctcatccatagccttctccacctgactgacttccatgccaagggaaatgcccagctgcgcattcacctccgggtttacataaaccggaattgcaccgcacagtaccagggcattgatggcacttttatgtacatttcgcggcagaatgatcttatcccctgccttgcagacagacaggatcatgctctgcactgcagatgtggttcctcctaccataaggaatgcatgcgctgcgccaaaagcatctgctgcaagctcctccgcttctctgatcaccgaaaccgggtggcagagattgtccagcggcttcatagaattaacatccagccccacacatttctctcccagcaactgtgcaagctccggatttcctcttcctcttttatgtcccggcacatcaaagggaacgactctcttctttcggaaacgttccagtgcttcatatatgggcgcatgctgttgtctttcataatccatttgacatgttcctcttttcctgtcgtcatgtaccggcaaatacagttctatcattcagcaattgtatactgcctcaaaccggcacaatgattcaattatttctctatatattcaagtcgaacgcatgtgagacacatcctcgcaaagcgtttatctccaaccatatcctttatatttgctatatctgcacaaaaaagaagcagataagttcattcaccatctgcttctctcatgatctatagaatttctcaggctctgtctctttatatactgaccggatttcccgtataaatccgtctgtatcctgtgcctgttcccgtattctgaaatattcatgactgctgtcgtcttcaatcgctggcaaatatatgctatgctcttattgaccgtttcacaagatgatgtgtgcttacgcactgattattataaagtaatcaacttataaaatttgagcttctaactcaatcaataatgtggtgtctcccacccggcaactgccccgcctgtccgtatggcttaacattcagaaactgtctctgaatgtgagcaaatatttgcatgaaaacgatagtgtcttttcatactaaagatgagaataacatatcttctgaactgttgtcaattccattttccatattttgcactagagcgtgtctgaaaaaggctttctgcaagatgtgcgtcacaatttgtgggatattttgcccggatgagggcgccgtagcgggctacggcaactgaattcgggtgaaatatcccgcaaagtgggggcgtacagattgcgggaatgatttttcagacacgctctagctttacccgctttttatattttcttcatttatcagggaaaactgtgtttattttttaacaatttctttccttgagaaaacgtattttctttcatgaccagggattacgattctcttctcttatcaatttgcacaacttttatccagtttactcacattttttgacgtttcaacaaaaattttcttgacatttttttctcaaaatgatatattgtattcatcaattgaaagaaccttcgagtactgacggaaagagtggagtgcaaaccacgtggagtcggaggtttgtgggagccgaccgtctgggcagtatttgaaatattcagatactggcctttttttataactttcagggcagaaatcaggaataccaggcagaccggccaatacttctttcaattaataattgttgctgatcgcggagtgaacagcaacagaagtttttcatgttatgcggaaacgaaaggagaaaaacaattatgggattcaaatcagacattgaaattgcacaggaatgcgagatgcttccaattactcagatcgcagagaaagcaggtattgacgacaaatatctggagcagtacggaaaatacaaagcaaaaatcgactacaatcttctgaaagaaagtgataagaaggatggaaaattaatcctcgttacagctatcaacccaactccagcaggagaaggtaaaactactactactgtaggtcttgcagatggtatgcagagacttggcaagagtgttatggtagctcttcgtgagccatccttaggaccggtattcggtgtaaaaggtggtgcagcaggcggcggatatgcacaggttgttcctatggaagatattaaccttcacttcacaggtgacttccatgccattggcgcagctaacaacttactggcagctatgatcgataaccatatcttccagggcaatgcattaaacatcgacccacgtaagatcacatggagaagatgtgtagatatgaacgaccgtcagcttcgtaacgtagtagatggtcttggcggaaagacaaacggtatgcctcgtgaagacggatacgacatcacagttgcatctgaaatcatggcagttctctgtcttgcaagcgacatcaaagacctgaaagaaagattatccaagattatcatcggatatacatacggaaaagtttccgagcagaaacctgtaacagcaggtgaccttcacgcagaaggcgctatgacagccctgttaaaagatgctctgaaaccaaaccttgtacagactctggaacacgttcctgcaatcgtacatggcggaccattcgcaaacatcgctcatggatgtaactctgtaacagctacaaagatggctatgaagcttgctgattatgcaatcacagaagctggtttcggtgctgaccttggtgctgagaaattccttgatatcaaatgccgtatggctggtttaaaaccaagcgcagttgtaatcgtagctacagtacgtgccctgaaatacaacggcggcgttgctaaagctgaccttaacaatgaaaacctggaagctcttgaaaaaggtatcccgaacctgttaaaacacgtttccaacatcaaaaacgtatacaaacttccatgtgttgttgctatcaacgcattccctacagatacaaaagcagagcttgactttgtagaagctaaatgtaaagaactgggcgttaacgttgctctttctgaagtatgggcaaaaggcggcgaaggcggaatcaaacttgcagaagaagttatccgtcttgttgaagaaccaaacgacttctcctatgcatatgaactggaaggttctatcgaagacaaactgaaccagatcgttcagaaagtatatggcggtaagaaagtagttctgacagctaacgctcagaaacaggcgaaacagttagaagctcttggattcggcaactgcccgatctgtgtagctaagactcagtacagcttaacagatgaccagaccaaactgggtgctcctactgacttcgaagttacagtacgtaacctgaagatttccgctggtgcaggattcatcgtagctcttacaggcgagatcatgacaatgccaggtcttcctaaagttccggctgctgagagaatcgacgtagacgagacaggtaagatcacaggtctgttctaatccggttgaaatcaatcgaataattcaaaaatataaaaatcatatttatatatgatatgtgtccagacgattttacaggcgggaagattttcccgcctgtttttttctttatttttttataagataatcttttccggaaataccaggttccgtcatatggatcggatccagaatgcgattaagttcatcctcgtccataagcttttctttcagaatcagacttcttacagattcgcctgtcttaattgccttttttgcaatatccgcagccttctgatatccaagatgggggctgattgcagtgataatacctacactgttttctaccagataacggcatctttcttcatttgccgtaattcctacaatacaattatccaccaatgtctggactgcatagccaagagtatcgatagactggaacatgcaatagaaaataatcggctcaaaggcatttaattccagctgaccagcctctgcagccatagtaatcgtaacatcattaccaataatattaaaagccacctgattaactacttcaggaataaccggattgactttacccggcataatagaagagccattctgttttgccggaagattgatttctccaaatccagtacgaggaccagaggacataaggcggagatcatttgacattttggaaagagttaccgcacatgctttcacagcaccggaaacagctacaaatggatccagattctgagtggaatcaatcagatcaaaagcctgtataaagtccattcccgatatttcagtgagatttggaacaattcttctcagatagccctcatctgcattaattcctgttccaatagcagtacctcccatattaagagtccgcatttcatccattgctttatccattctgtggatatcacgcatgatcgctaccgaatatgccttaaattcctgtcccagacgaattggtactgcatcctgcatctgtgtacgccccatttttattatgtgatcaaactctgtagctttttcattaagagcatcatagaggcgaagaagctgttttttcagattctgcaacaaacgaagagaagtcattttaccggcagtaggaataacgtcattggtagactgtccacaattcacatcatcgttaggatttataattgtataatcgcccttttttcctcccagtatctcaatcgcgcgatttgcaattacttcattggcattcatatttaaagatgtgccagctcctccctgaacaggatccacaataaattcattatggaattttcctgaaacaatttcatcacatgcctggacaatcgcctgtgcttttttcttctcaagaagccccacctcacaattggttatcgctgctgctttttttatgtatgcaagactgttaataatttccggatgcatattcagccccgtaatgtggaaattttcagccgcacgtaaggattgtactccataatatacatcttccggaatatcctttacaccaatagaatccctttctacacgatagtctgtttttttcatagttattcgccctcccatgtatttgccctcattatatatctctgctataatataatcaaatacatatatttttataaaatatatagtgtttaagttatatatcggaggagtttatatgtttcagggaatggaatacatctatgaggtctacaaggaaaaaagcttttccaaagctgctgctgctcttttcatttcgcagccttctttaagtgcaaatgtaaaacgtgtggaaaaccgcattggttatcctatttttgatcgaagtaccaaacctttacagttaactgaagtcggaaaacattatatacaggctgttgaaaaagtcatggatattgaaaataatctcgaaaactacctactggatctaggaaatctcaaaacaggaactcttaatgtaggtggcagtaactttttttcttcgtggattctgcctccccttattgctgatttttcccaaaaattcccccatgttcaaatttctcttgtagaagaaagtacagcaaagctatcccagtttctccaggccggaaagttagatctggtaattgataactgtattctggataaccagatttttgaacattatatctaccagaaagaacaacttcttctagcggttcccaaaaattattcagtaaatacccgactgcaggaatatcagattcctattgaggaaatccggaacggacagttccgttcttctcatattccttctgttccattaaacaaattcgagaacgaaccatttattattcttcgttcagataatgataccggtaagcgtgcacttaccatttgtcaggaaaatcacttttcgccttctgtagtatttcgcctggatcagcagatgactgcctataatattgcatgtttgggaatgggtatcactttcatcggggatcttctgctctccagagttccaacaaattcagaacttgttttttataagctacccggtcagagcagtaaacgcactgtgtttttttactggaagaaaggccgctatatcagcagagccatggaagaattcctgaagctgcccttttcctgatatgtcataatcaaataggttatggtgattggtcatcatcagatgtacgtcaaaatggggttgttgtgctaaataagcacaacaaccccagtatgtcaggcagatattcgattagaacaatggcttcatcgccggatacagagttctgaacttctgatatctctcttcatattttgcaaccagttcaggatccggttctactgtatcaacaactttggcaaatttcttaccgatggtttctacatccgggtaagcaccacagcctactgctgccagcatagctccacccatggacggtccttcttcgttctccagaacatcaaccttcaggttcataacgtttgcaatgatcttcttccacagtgggctcttagctccaccaccgcagatcttggttctctcaatcttgattccaaggtttcttgcaacttccagggaatcacgaagaccaaaggcaacaccttccagaacagcctgtgtcatgtctgctcttgtgctgtccatggacattccgaagaatacacctcttgcatcaggattattatgaggtgaacgttctcccatcaaatatggaaggaagaatacatgattctctcccagcttctgaattggagcctgctctgctgcgaaatcctttgtctgaagaatctcctctgcccaccatttgttacaggaagctgcgctgagcatgcatcccatcagatgatagcttccatctgcatgacagaaagaatgaagtgcgttattttcgtccacaccaaagtttttactggaaataaacacagttccggatgttccaagagaaatattacactgaccgtcaccaactgtacctgttcctacagcagctgccgcattgtcacctgcacctgcaacaacttttacattctcactgaatccaagttctttcgcaatctcaggtttcagagttcctactacttcccaactctcatacagtttcggaagctgctcttctgtgattccacagatctccagcatttcttttgaccagcagcggttcttcacatcaagaagaagcataccggaagcatcagaaacatctgtacaaaaagaaccggacagacgatatgccagataatccttaggaagcataatctttactaccttcttaaagttctcaggctcatttttctgcatccagaggatcttcggtgctgtgaagcctgcgaaagcaatatttgctgtatactgtgaaagtttgtcttttccgatcactgtattcagatattctgtctcttcgcctgtacgtccgtcattccagaggattgcaggacggatcacattatcatccttgtcaagtgttaccagaccatgcatctggccgccaaaaccaattcctgctacctgcgctctgtcgatatcctttgtcagctctttcataccttccatactctgtgcaaaccagtcttccggtttctgctcagaccagcccggatgtgggaagaataaaggatattctctggatacgatgttacagatttttcctgattcttccataagaagaagttttacagcggaagtaccaaggtcaataccaatataatacataagtgctctccttttctatttctaatctaatacatcccagagcaaagccccgggatgcctttaatatagtgtcagtttatttattctgtattcagattcattcacttcacatgaacattaataatccgttttactgatttctcattaaccccatggattttctgtcgggtatcttacacctgccggctggttatatccaatcttcttaacatccagtccaaggaatttcactacctcatagaatgcttttccgtaatgtccaaacataactgctccatgatgcggatagttgccctcgatcagtacgtgacggtagaatcttcccatttctttgattgcgaaaataccgataccaccgaatgatcttgtaggtacatccagtacttcaccttctgcaacataagaaaccagctcgccctcggaattgcactgtaaacgatagaatgtaatgtcagatgcagcgatatcaccttcaagagttcctcttgtgaagtctggttcagatcctgccggctcaagaagtctgtgctggatcagctgatatttaacagctctggaatcacacatcttgcatgcaggagtatttccacaatggaatcccataaatgtatcagtaagcttataatcgtattttcctttaatatcttcatcatagatatactgtggaacagagttgttgatatcaagcagtgtaactgcatcattggaaatgcaaagtccgatgtactcgctgagtgctccgtagatatcaacctcacaggataccgggattcctctggaagccagacggctgtttacatagcaaggttcaaatccaaactgtgacgggaatgctggccagcatttgtcagcaaatgcaacgtattttcttgctcccttatgagcctctgcccagtcaagaagtgtaagctcaaactgtgccattttcacattaaggtcagcataatatttgccttcgcccatctctttggccatatctgcacaaacttccgggatacgagggtcattttcatgctctttgaaagaaacaagaagatcaagctctgagttctcttcaatctcaacgcccagctcatagaggcctttaataggtgcgttgcatgcgaagaagtcctgtggacgcggtccaaaagtaatgatcttaagattgctgacaccgatgactgcacgtgcaaccggtacgaaatcagcgatcatctttgcaatatcatctgctgttccaacaggatattccggaatatatgctttcagatgacgcatttttaagttgtaggagcagttaagcataccacagtaagcatcacctctgccgttgatcatatcgccgtcaccttctgctgctgctacatacatgcaaggtccgtcaaatctctctgcgatcagagtttcaggagtttcaggtccgaagtttccaaggaaaacaaccagcgcattacactctgctttgtttacatcttcaagagctttctccatatccttttcattctcaacagttacaggacattcataaagttcacctttataagtttccttgattgctgcacgtctcttctcagaaagctgaatcggaaaacagtcacggcttactgcaattaatccaagttttactactggtatattgttcataatataaattcctccatatttgatatgtatttatatgattttgttattcatttactatattctgatactctactgccacagattccgagcaactcagtcaatggtgatattctctccacgaagtccgtttactgcaccctcgattgccgcatcttcatgtgcaatgagccatttgttcttagctgtcagcaggctgtcctcgcctgtcttagctgtctcaaatgtaagatctgtattggttcctgccggaagtacgactacacactggaaaccgccatcctgtacattgcatggcgcataatgaagtgtagttgcatatacttcaatacctgttcctgcaggtaccaggaatgcttcgatcttagaagtatcatatgtaaaatcatctgtgatatcctgctggcttccgataagcagcaccagatctgttaccgctacattgatctctgaactgcggtgatattctactgcatttaatttcttattatgtccgttgcagtatccaatttcgatcgggattccgccaaatcctttattctgcagtgcttttgctacatccagagcttccagctcctcaacagatggtacataaaccacatcatccggaaccggtgtatgtttcatttctttgagaagagcactgaagtcatacccttcaagcacctttccatatttacggaaggaagcatctgttacattctgaattttcacttcaaaaacctccttatattctgtagatattacgttttcttgactgtgcttagaatatatcagaataaagggtacttttcgccagttttcttgtctaatctatagcgtttttttgacctttttcatttatctgttttcgcatctcacttggaagtaccccatatcttttctgaaattccccggaaaaacccctgctactgcaaaatccattatctagtgcaatctgactaattgtatggtctgtattcagcaaatccctgtacgcatatgccatacggatatcctgcagataagttttatagttgatttttgcatatttttggaacattcgcgacaaatatgcatccgagtatccaaaagtagccgccacatcagaaagcttcagttcctccctgtaatgctcacgcatatatgtggtgatttttgacaatgcatccagacggcggctgtgtcggatatccttctccctggtctctgtcacacggtaatccttcaccaggatatacatgatctcgtaaaaaatagaaattgtccggaactcatatccaattttccgctcggaatacacatgatataatttacgaagcaaagaagccagtttcttatccaccagctcctcctgcccccgaaaacggatatatctctgagcagtaaaataattctcaaactgtttcagaggaatctgcagaactactgttttatttttctccacagcatggatagagtgggtctcattggaattaatgattatctgctctccagctttcagcggatattcatccttatttacaaaaaaatccaggcgcccctccatcacagcaaaaatctctacagacgtatgccagtgcttctcacgcacataattgccatttcctccttcaaaaagaaaaaccttaaacggaaatccctcattaggaatgatcagttcatgctgaaactccatatatattcacctcctaacaaaataaccgcagtattcggatactccaatatactgcggctatttcgataactatccagctttctgcataccaaatctgctggatgatcctattcttcacatagtcccacccactgcttattgcttttcgcaattgaagcaggggacttacttgattcggttaagataacacattatttgcagagctctgccacaacctgattaattacctttccgtctgcttttcctttcatatcagccataacagccttcatgatctgccccttatttttcgttgcgatcacatctgcaaatttttcttccagatatgcttttacctctgctgcatccatctgttttggcgcatatttggcaatcacatcatatcttgcctggtattcagccttcagatcctcgcggctctccggacaggtatccagctgttctttcacagttttcaactctttcagaataactctgtccaccagatcactcttaatctcatcacggcatccctcatcgatcgctaccttctttaccgcagagatcagagaggaaactgcttcttttgttactttatctttggctttcatagctgcaaccatatcttttcttaatacttctaattccatttttgttcctcctgttttgtaatatatactctcggaatctttattgtaattctaagaacatatatgatttttcgcatctgctccatacgttactgttcactctgttctcagtaacgttgccaaaattcatttcaaattgcctgtggcaatggaattttggcttgtatgtctcgggattttggcatattcatgccaaaacacctcgcgggataatggcgtgtgaacagtaacatccatacttttacagctgcatttctctgtattaaggatagcacgattttttgaaaatgcaaataattttatatagaaaatgatcacattatcatacaaaagaaagccaccccaaaatcatagggtgaccttctcatatatgattcagctttattttttatgaaaaagaattgtgcaaatcagcacagtaaagggtacagaaagtacaatcccgaaactgcctgccaatccctgcatgatggcaattccgatattattggaattgatgatctgctggtacggaagattataggagtaatcaagaagaagagtactgacactacttcctgcaaatgccagtataagcgtattgctgtccgttcccatcatgtctcttcccacacgcagcccagccttaaaaagttccttcctggataaagacagattctgtctgtaaatctcatcaatggcactgctgatggacatggcaacatccataaccgcgcccagacaggagatcagaagaccggaaaaaagcagtcctccaacctggatacgattggtattccacagagtcatcagtgtctcaatatccgaaacattatatccggaaattcctgatgccttactgaaacaccaggcagaaaccccggcaagaataacaccaacaagggttccaagtgttgcagcacaggttttccgtgtaggtccgccgatcagatacatcgtgaccagcgtagtgataaaacatacaaatacagcagtccagaagggggaatacttcaggtacaccagaggcagatatacaaagatcacacagaagaatgtaaagacaagccccagacatccttttatcccctgttttccaccgatcaggcagagaaccaaaaggtatatcagggcaaaaatatagataaccccttctctgtcctgtgtataaacactggcaactgtagaatcgccagcaacactctgcatgacaatcaccttcatacccggtttgcaggcagctccaaacagatatccggaactgcttgtaatatccagctcttctccctttctcactcctgtaagcatacggacacgaaccttctgctctcccacacgggttccgttttcctccagattatcctgaaggatttttactacttttgctttctcaaatgtctgtcctgtccggaccaccagctctgttttttccacctgattcagtttaatgacaaaaacagcgaacgcacagacaaataaaacataaataagataccggactgctttttttctggtaagcagtccggtaaattttatatttttcatactcatgaaactatttgcgaaaaattatcttaatttccagaagcttccgctgctgcagttgcagatgtatctgcggcttctgctgtatctgaagcactgtctgtggtgtctgcagcagtgtctgtatcatctgaagaaccgtctgtagtatctgcagaagcatcagctgcgtctgcaccagtcttcttgattgtaaaggtatcatcaattgcttcagccttaccatcatcagtaatctggtaagtatcaatcgcaaaggtatctgcagttaatgtgatcacagaatagcttggaagccagttctggctgcgggctgccacataatcctgctgagtggaaagaagttcataatatttggaaccggaagctgagtttgcagtcatatagagaattccctgtggatctgtaactgtatctccgtcaacatcctcaattgtgtagcagtcattgtcctcatggaatgcatccagtgctgcctgtgcatctgtgtctccctcttccggagcaagtgcgatctgttcctgtgtatctacatttgtcgcatgatcccagtcataatctgttccgtctgcattcaggctgaactcatatttaccatgagtctgtccgtcaccataaagcattttggaacggctgtatgtatgatcgtgtccctgaagaaccacatcaatatcatttgcatcaaatacaggtgtaagctgtgtacgaaggatcataccgtctgtgtcggagtggtcaagacctgatccgtaaatatcctgatggatggttacaattctccattttgcatcaggataagctttgacagcttcttcaattgttttctgatgctctgccacattgtaattattggtattcagaacaacgaaaaggccctctccatagctgtagtagtaatcaccacctgcctgagttttaccattttctgtattattcgggttattgaaatgatacatataatcctcattcagagaatcatggttaccaattgtagttgccactgcaagtcccttcaaagcatctgcacttaaataagaagcatattcttcctcttttgcttcaccggtcttgttaacctggtcacctgcagagatcacaaagttgatatccggattctgctcaagtgcagtattgagagtacggttccatgaaaaaccgtcattttctgctgctttattggctgcaccggactcattggtaagctctgctccattctgtgtctgacctttggaagcaccgatctgcgggtcacctacatagagaatttttactgaatctgtatcctgtgttttgtactcagatacctctgtctgctcaccgtttttctcaactgtgtaataataagttgtgtttggctccagacctgtaactgttacatgattatattcatatgctttgtctcctgtaaagctctggtctacatcaccggcagttccttcaaaggtttcaagattgtccttgtctgttccgaaatgaactacaggtgttgcatcgctgtcacctttttcactgtaccatgcaaagttcagctgtgtatcatcagcaccaggtgttaaagatacctttgtaaaatcagctgctgttgtttcccaggctgcatcccagtcagaccatccggaatcagcaccaaccacgctgctgtctgtataatgctctgtagatgcatatgctgccggacaaaccatagtcactgaaagagctgtcaaaagacctgcaattagttttcttctcataataataatagactcctttttactcaaaaaatattatttttttgttgacaagtggagtatatcacccgaattttcaaaaaacaatcaggtttgcttatgtttgacagacatttacactttccttaacaaaagcagatatttgttaagtttcatacatcccagagaaacaatcattttaatacagaagggaagttgttcccctgctccagttcttccatctgtcccagaatctgcttctgacgattgtcaaaaagcagacctttattgtgacgataatactgatccgaaccattctcacggataaaccagagactgtaataattggcattcagttccgtgataaaggctaccatttcctggctgtcgccaaaggccgcttccataaaatcaaaaacattctgaagtgtctgggaaatatattctgtctgagtttcaaggctgtcagccacctctgcaaaagctgtttttgccttctcataagtagccttttctgaaatttcattttcaaagaaattcactgtacggataaatactttttcttcatttttagtgagaagctcagatttttttgcagtatgaaaatcattttctgcctttttataaatagattccagcgtcatttccggaaggttatctctgtattctgtcatgtaaccatagagctttgtcacataggcatccataaaataacagtctgcaaataactggctaagctttccgttcaacaaaccaacaatactcagatgctcatccaatgaagcattgcgaattttgcccagagtgatgggcgtccatttaccctgaagcagatcctccactgcataatctgtcttatacttattgtaaagtgccagatacgaagcaaaatccttggcaaccatgggatgctggatgtactgatataccacctctctatccacttctttgttcagtgtttcatatacctgtatcagtctggaaagatcttcccagcctctggcagtggcaaaaatgcgtccgtctactgtgttctccattctgtagaaattctttctgcgaagctccagataagagatcacagcagggtggatcccctgctcataggcatattctttccatacttcaaagtccggctgcacatcaatcctcttgatcctgtcaagagttaccacatcaaattcgcggacagatttattgtattccggcgggtttcctgctgtcacgatcacccatccttccggtactttctgattgccaaatgtctttccctgaagaaactgcagcatcataggcgccaaggtctctgatacgcagttaatctcatcaataaaaagaattccttctctgagacctgttttttccatcttttcatagacagaggcaataatctcactcatagtatattctgtgacagaaaaagtctcctgaccaaaggttttctctttgataaacggcaatcctactgcactctgacgggtgtgatgtgtgatagtataagataccagacctaccttacattccctggcgatctgttccataatctgcgtctttccaatacccggtgcccccataaggagaattggtctctggcgtatggccgggatcagatattctccaaattcatccttcgcaaggtatgcttctattgagtcctttatctcctgttttgctcgctttatatccataatgtaaatcctttcctgctgaacacttcttacttttactcagttttttatttcattacctgtctggcttctcaaaatcatcctcatccaaaatcagtttcatggcccataccggcacatccacatctctgtaattatcctgcataaacacaaatgcagtcttatatggcggcattttcttcgggtaaattccgaatccgtctgtaaaatagatcagtcctttcaggttatgaaattcatgctgttccagcagtttgtccacccattcaaatgcaggcctgaaatctgttccgccatctccatacaattccagatgttccatatagtctttcatttctttctgagaagtaatctttttatctgtgtggactttctcatcacactgaataatgtgcacatttatttttgtaaaaaagctctcactctcactaagtacaccgtatgtttcctccagaaactttctcaccagttctcctgaacaggacatggaagtatcgatgacgatcacaaattcctctatcttcttaacttctttggattccagtggttcgatcagcggcatgtttccgtagagacgcagaccataggtataaaaattgtaatcaaagctgtcatcatccactgccagttcttcatgaaaaactgcaaatttccgcaggaattctctgtaatcataccggcttctgttctctgtttttatctgctccaggaaatctccgtcccgctcacctgcctcctgggaaaaggtttccagatccgtctcgattccatcattgatctccccccatttgcggctgagcatgggattcagtttctgatccggtttcttactttcccagtatctgtggtcatctgtgtgaaattcctgttccaggtttgtaagatccttttcgttcagattccattctgacaatattttatatactctctgtgcgttgagggtttttccctctttttcaaggagacggtaggtttcccttcgcagaagactgcgtgagaaacggatactccgatagttcatcccatctatcatatgctccactgaaatgtcacaactcagatcacgcatacgttcctggattgtgattccatcgtctgccctcttcttaccttctgtaccgctccatgcaaaatgccggaaaatacagtggaataccatatgcagataccctctgttcaccagaatcctgttctctctatataagcctcccagcatctgcggctgaaaatacatcactcttccatccgttccaaatccatggacctgaccatccatctgataagaaaaactgctcagcgccacatccaaaaaccgcattcccagatataattcatcccgcgcaaccctgagaatactgctgccgatttcctgcaaacgctctgctctttctgctatttcctgtattttatcctctggctgcatcattattttcctctatatctatcacagttcaaacctcttttttcttagtatagttcttctattcaaagatttttctgtagtttgtgattgttcatttttcccctgctctgtcctgtcagcttcctgactattttgcagcttatccacatctatacgttcacttcctgccgtattatccaccagatttgctctttcatccatcaaaaatgcggatacttccgtttcttttctcttagatgcacaatccaacgcagaatcaattccttccagtgtccagagtttttgtgaggatatcacttccaatctgtgcatatcctcatgctttaccagatattctgcaatatctcccagattcttacggatatattccctgtaattctccctggctttcccagtcagttcataaggaaactccagtctgccaaatgacatatcaaccagaacttccagctcatccatggctaccgccatttcaaaaagcctgtcatattcctgataattcagctccttatcataaaaacactgcctgtaattactgcctgatccatgatattccgtatacaaaatacgcgccggagtgttctcaaccgcctcatcataatgctccggaaatacaagtctggcttcttcatactcataaagaaagtttacatctatcctctgccacatctcgcccagcatttccttaacgcctgacttctttccctgtctcatatgaacagtcagcttctccaatgcatggcagcctgtaaatgcaccacagcctatctgcatcaggctgtcagaaaactccagctttttcagattcccgcagccataaaaaatatatcgtccaatctcttttaaagtgtaaggaaaaacaatctcctccacgtcatttcctgccagaacatgctcttctctgccaaactcaagaccatctgacacttcccacagactggcatttttcaggtcttccttctcatccatatggctggagaatgcatacggtactgcactaattaccaatttgccatctatcattcccggaatctcaactctgccctctattccaaaacaccgcagaatttcaatcccgccagatttctctctgtagtaaatcttcattttctcatttctccccgaagatattttctctcaaagcacataaaatcatccctgaaaagtataatacttcccagggattttttccagacaatataattagcgtaaaaccagctccggtttaaaattcagatagtctcctgacaccagcttgtactctattccatccacatagcctttaaagctgtcatcatatcgcttctctccatgacagtgagaatagatcaccttctcggcgccaaattcctgtgccatcagggtaaacggactctccatctctccaatacttgtaggtggataatgaagaaacatgataaacttctcatatcctgctgccttcgccgcttcaaaagagtagcgcagccgccccaactcccgctctcggatcttcaagaaatgctcatagctgtcttttccttcataacagtagcctttggttcccaccagcgcataatcctcatatgtataaaaattattctgcaaaaattccagctttcctctgaacatctcattcagattttctgtcttcttcgcatcccagaacatatcgtgatttccccgaagcaggatcttcctgcccggcagagccataataaaatccagatctgcctgacactctgcaagatctctcccccaggaatgatctccggtaatcactactgtatcattctctgtcacttttctcttccagtacttctcaatcttaaccacatgattcttccatcttttatcaaatacatccataggtttattgactgtaaacgaaagatgaaaatcaccgattgcgtataggctcattgtacactctcctgtctgttctgctcgttaattatcttccaatctcgatgctcatggcatgccaggcttctccgccccaggtggagtttgcctgacccagatctgtaaagccgaatttctcatacatcttcactttttcatccagacaggtgaggaaaagtttctttcgtcctttttgtgcttccttctggcagtatcgggataccagttcacgtcccagtccctgcatacgatattccggacggacgtccagacccagaagcatgatatttttgccttcaggattactcagagaaatatctgtgaagaattcatctctgaaagcctcctcatctgtaggaactccattaagaaatgcagccagctttccggtttccttatcctcagctaccagaaatgtttctgctgttgcttttattctctctgtcagacttttcggagaacatgcctcatttggcgggaaacagatctgctcgatctctatcgcctgctgtgtctcctccggtctgatacatctgaattcaaatctatccatattgtttgtactcattttattatccttctcctgttatcttgttatttcctgcatattcgggatctgcaagtttcccatatagttgttttatctacatcgggcagcttctctttgatttctcatccaaatcttcccgtacgtagtgtgcattaaactccatgttaatgtcgcggatttcctttgtaccatcaatatattcctgatacatctctgtcagtcccgccatacagccatcacagcttgcagaaatattcccaaaagattcctccacaatctgttttctttcttctctggttgtgtcctttatcaaaatactcttaatctccataaccttcaccccgactttctttggtattcttttgatatttctttccttatatcttttatttgattgtaacatctgaaagcatttttgtgaagctaagaaacaggcataaaaaacggtctgattacattctctcaaaatatgtcagtttaaagtgttaaagtactggaattttagataacaccatgttatacttgtaaaggaaaatgtgcaggcagtccggtcaggtataaaatattcctgagttccggcattatcaaagacctgcatgtacttatatggaggaaacagatcatgtctatgaaaatcaatcacgagctccctttaccggaggttctgaaatctcagtaccctctcagccaggaactcaaagaagtaaaaaaacagcgcgatgaagaaatacgccgtatcttcaccggtgaatcagataaatttatcgtccttgtaggaccttgttccgctgataacgaagatacagtctgcgaatatgtacgcaaactgaaaacagtggcagataaagtctctgacaaactgatgatcatcccgcgagtttatacaaataagccccgtaccacaggtgacggttacaaaggaatgcttcatcagccagaccctgataaggctcctgaccttcttgccggaattattgctatccgcaagatgcacatgagagttatgcaggagacaggactctcttctgcagatgagatgctttatcctgaaaaccgcagctatctggatgatattctctcctatgaagctgtaggtgcacgttctgtggagaaccagcagcatcgtctcactgccagtggcatggatattcctgtcggtatgaagaatcctaccagcggtgatctctctgttatgctgaattctgtcactgctgcacagcatcctcaccacttcatctacagaggaaatgatgtggaaacttcaggaaatgatctggcacacacaattctcagaggtggtgtaaaccagtacggacagactattcctaactaccactatgaagatctgatacatctgtctgctttgtatgccaaaaaggaccttaagaaccctgccatcatcatagatgccaaccactcaaactccaacaagcaatacaaggaacagatccgtattgtttcagaagtacttcacagccgtaactataatccggaacttaaaaagctggtaaaaggtgttatgattgaaagctaccttctggagggccgtcaggatatcagtgatcatatgactcctggctgttccatcacagatccttgcctcggatgggaagatacagaacggcttatctatgatattgctgagaaatgctgatttttatggataatacaaataattcctgctgttgtggagagacagaacatttttcaggctgcctgatctgtggagcaccggtcacatacagcgtcgaaagttctgtgaaaacctgcagcatctgccacaaagagcagctgacaaatactgtctgtgaaaatggccattttgtctgtgatgcctgtcacagctatggtacttatataccggtgagcacagccctcagaagcagcacagagaaggatcccctgctgcttctggaagagatcatggaccttccttctgtccacatgcatggacctgaacatcatgccattgttcccagtgttcttctgactgcacttcgcaataatggagagcgtatgaattacgataccgcattatctgaaatctgtaaaagagcgaagcaggttcccggtggtacctgcggttactggggagtgtgtggtgcagcagcaggtgccggaatctttatgtccgttatgaccggatccggtcccctccataaggatgcatggccctttcctcagaagcttgtctctgttattttatccaaactggctgatgttggtggtccgcgctgctgtaaacgcaccagcagaattgctattgaagaagcgatcaggttttacaggcagttcagctctgtaaagattccgctgtcttctgtactatgtaaatattttgaagataataaagaatgtatcagagaggactgtccgtattatcctgtgaacaaataactattcataaaataaaaaacagaacgaaatccgactgatagtcaatgggtttcgttctgttttctaatagtttctctataaaataatacgtttcgcaggatacaatgccctatcgctccattctgcttttctgcagtccaaagaaataatattcttctctgcgcagacatttctgatcagttcttctccgttatctgatataaaaagtgctgtgatttcttttttccctccaacactccttacacagtaatctaccagttccggaaactgaaacagtaattcatccatttctctcatacttttggactggtcgatgcgccttacaaaatccagacgccttacctcacttccgcagatacattttccggggatgatacgtgtatgatcgccggtcctgtatctgatcataggctgtgcctccatcccaatggttgtgatcaccagttctccccattgaccgtcaggcagaacatttccctctttatctatgatctctgtgatacaatgattctccctcatgtgcatgccctcatgagcctgacagcaaatcgcacccccaagccccatctctctggaaccataatgaggccagagtggtgttcccaaaattttttctattgctttcattactgtttccggacaggcatcccctgatatcagtgctctctttatactgccttttccacacattctgagcatggaaagcagtgctgtcggcatacctacataagtatccggccgctcctcttccagaattgtttttaactcaccataggttttattgttcccggttaaaagggggtgtgctcctatacgtctgattgcttctgcgatcagctctcccagtccagaaggacctgaaaacggcatggcaaccatagtcctgcttcccggataaataaactcaccaagtccggccataaaaagttctatggtatgttcacaatctccttctgtataaaatacacgtttacctgcacctgttgttccgcttgtctgttctgaaatgatcctctgtatttctccctgagagcacagtaacatcctgccccctttctgagcaaggtcggattccgttgtaaagggaagggttttcagatcatcaatgctttccagcctttccggcagatctctataaaatccctgcctttctttttctcttttcagaacagcattcagtttatccaactgtattttgtttattgtttcccttgtaatatctgtaattttttcctgcctacagatcattgcatctatattggatcgtttcactttctgtataaatatattcctttcagattagtcagattatatgcacagaacggtaccattccgtgatcaggatccacttcacagatataacagcgtttcagacggtcaagatccagattccaggcatcctgaaagatcatacctgatactgcaaaggtttcattatgtatccggatcagaaactcatctagcgcatctgtctgtgtcatttctccctcatcataggtttttgtactgtagctccactgattttccacatactgcctggaatcatcactggtagtacagcagcatccttttcctgattttttttcaagaagcttcagttcccgctctccttttctcagataacttgcatgaaaggagcagtagggattctctgcgccgccgcctgcaaaatcctcaattttcatcagtccctctgtctgttcttcaataagtctcagcatctttggtatggtgatgggattttgggggcgcttctgggaacatctgccaaaataactgataggctgaaaatgtacgccacgaacaaagggcatatgatccagaccaaatttcagaatattccctacctgcatatcatttactcccggcgcaatgaccggcacaagagcaataccaagctctgcttctgagcagtttaagaccgcctttttcttcagttccatcatagcctgtccacgtaaagtctcataaacctgatctgtcacaccgtcaaactgaagaaatactgtattcagtcctgcttttttcagctttccggcatacccctcctccctggcaagccggatcccattggtatttaactgaaaaaatgtaaatcctttttctcttcccatatgtatgatttcaggcagatcgtccctcatggttggttctcctcctgaaagctgtatattaaagggacctccgtgagccatcagaaaatcatactgtttttctatttcacagatgggaatatctcccttttccctgtcttctcctgctgaagcaaagcagacaggacaatgcatattacagcgttttgtaacttccaggatcatacagcagccttttctttcatgttcctcacagagtccgcaattatccggacaggatttttctttaaccttcggatttacaggcgtttctgctgagagattttctcttccccaggaaagataatctgctgcatttccttcccagatcagggtctgaaattttccatgagcattgcattcctttaccagatagatcccgtcttcaccgataccttttatggcaggaactaccttcatacattccggacagacactctttgttttgccgatggtgatcaaagctccagtacctcccgctctgtcagaatttccataacttttgtataagtatctgcaataagtccaggacatttctccatgatcacaccccagtccagatgagtgatatccttacagtaaaaagctccgaattcttcctctgtcttctggcggaaccactgatataattcctgtacagccggtttcatctgtgcatcttccttctcctcaggagccagatttccgagaaaatatccgatggcacaggcacttcctgtcagacatccgcaggtatctccacagtaaccgattcctccgccaaggcctcccattgcctttacaagctgtggattttcctctcctatggtttccagagtcatgatcataatgatctgtgaacaatgatatcccatgctgcctaattccattattctttcgtaaagatccatacattactcctttctgccaaccaccatggtatagcctatttttctgcctttgtattctttctgcagaagcttatgatcctcgcagcagaatgaatcattccagattgcttccagataatattctctccagagagcagtctgatcctcctgacagagaatcgtaaaccctgtttctttcacaatttccagaagattgcccggatccagatctgacagcaaaagaaatcctccctttttcagtacacgccagcattcagagactgcctttttctgatctctgctgacaaaaaatgcacactggctgatacagagatccatactgtctgctgcatactgaaggtccagaaaatctccctgctgcacctcactgcttcgcggaacaagatccacaccctgcacattcagaccaaatgctttcatgatccgcacggtctctccctctcctgctcccagatccagagctttcattccttttttcagttctatgcttttcagaagatgaattgtctgctcttccctgccgggatgtctgttcatctatttatcctccagtgcacgttccactgccaaaacctttccaagagccagttcttccggaacatagacaaagccacatttgggacagaccggcatctcaacaggaaaaccgttctccagatacataaattttgcttttccctttacaagaggaaccttgcatttcatgcaggtcagctttccctcaggatcaatggtataatatgttctctctactgccattactgtcccacccttttcataatattcattctatgactgtatgctctgcgtaccagatacccttcttctgtttccacaaatctcacccagaatgtaacatttccaagtctgctccttgtcaccagttcttttgtctcttcatcaaagatcgcttcctgattttctctgtaatctgataatacacgctccacatcgcttttcaggatcatacgttcatccatcatactgatggcatcttctgtatatgcaacggtataatcttttttctccatcatcagttcctcattccatatattttttaaaagcttctcttttagctcaagccggttgtagcgtttctcactgatatccggcatattggcggcatttataccatacagaagttccaggatatgtctggattccctgccttccctgacaaatcggtccctgcatgccatgcagtacgttatatatgggcaatcggatcgttccagacacttttctgtcattttatctgccatctctttattagcgtaggcagtcagtccgccgtatccgcagcagggagaccgatctctggaatattctgtatttacaacagtgcaccccatatctgcaagaagctctcttattgtatcctgtgtctgtgtatctcccctggcaccgcaggcatcatgtattgcaacaggtatctccagtccttttgcctgtccgggaagtccgatttcctttaagatctcccagattcctgtgactttggcgccaagactctcttttaactgtttcatacagcttggacagcctgctataatcataggatctcccagttttgcaagctcctgcttcaactgttcatttaccttttctgtcatttcatagcgtcctgcccattcactgatagcaccacagcatcccagcatcagagcaacaccgccctctgtcctcctgcacagatcctcatatgcctctgtgacaacatccggcgctatagctcctgcctgacatcctgggaaaaatacatatctgcaggtttcatatcccggctgaggtctgcataagaaagcctccgaattggagaacagcatatccatcagtgcaaattcatgaggtgccagaggcattttgtctgtagataccatgttttctcttgcagatttgcagacctggctcatatcaaacccatttggacaggttacagtacactgtccgcagagtgaacaggaattcatcggtttattcatctggtgatctcccataatgatctgggtattattataaatctcacgtgcaagaagacccggatgctttttatattcccttaaatagacacagcttttcatacactcatcacagtgacactgaatgcatcgctttgcttcctcaatagcttcttcttttgaatatccatctgtgctgcagggaatctttttggagcctttcatcccgtccatatttgtatagagcctggtggtaactgctccttcactgcctctgttgctgtggggcgaaagattctgtacaaggaggtctacagtcagggcagctctctttgcagcaaaagctgcatccatcacagaccggaccggaccgctgacaattcccgcctgttctctcagcatgatctctgcgtctgctgtttcctctggagccagctttttggccacctcctctgaagcacagaccacatctgcctccttcattttcgctctgataaacggaaggtcaagactgcatccgaattcaaaggaaaggtccatggaactgagacgttttacctcatttttgcgatctgattccaaaagctccggagctgctgctgcaatataggcttcataatctttctcctgacagtaaatggttgcaggatacatcttcttttccagttcccctgcaagaaacagcgggaacaatcctgagccaaagatcacagccttttttttctttctgatacgaaatacactgctccgttttccaggttccccatatcgtacaatggcacgctctacttcacgtatggatatgccatcacccagctcacagagtctgcatttttcctcacatggtgcagtacatccgttacagaggatcatgggaaatggtgtgatcttttcatagatagccagagctttcttaaagtttccttttgcagcataaaacagcatttcttttgtatctgctttgaaaggacaggctgcaacacagtacgccggctgttcatgaacacagaggctgatcatatgatccatctcttcctttgacattcgatttacgtgataaacatgagtggaacctctttcctgtatatatgtcataacccgatactcctttcatttccaaaggggagacagtctcccgtctccccttattatatcacatgataaaattatactgacagttatttctcaagttcctttaatgctgcaagaaccttttcaggacgggcaggaacacgtgtgatacgtgcgcctgtagcattgtagatcgcattcaggattgcaggatgaggagcatccagcggagcctcaccacagccggcagcaccgtaaggaccgcttgggcgatatgtttcattgaaatgaagttcaatatcatccggcgcatcatttggatacggaatgccacagttcttcagagaagtatcatggttcagatcctcgaaatcttctgtaagagcaagaccaataccctgtacaaggccgccgtagaagttgccttctacaagaagtctgttcatgatggtacctacgtcagccacacaggtgaatttttcaactttaactttacctgtttctgtattaacagcaacttccggaaggaagatcgtatacatgtaggttgcaaacggatcaccctgtgctgtatcctgatcgatcggatgatctgcacagaaggttgtcacccagttaccttcatattttgttgcaagaccctcagccaccatctcatcataagtacggaaggttccgtcttctttcttcatggctgccacaaggttttctgctgccagacgacatgcattacctgacataacctgtgaacgtgatccacctgcaggacctgcattaggacatgtcttggtatcattcataacaagtttgatctgttccggtctgattcctgcctgacgaagtgtttcatgtgatgatacaagaacccccatatcagcgccctgtccgtgatcttcccatgcagcatacattgtaactgttccatccggattcagctctgcaaatgcgtttgatgtatcaacaccatcaagaccacagccatatacaccgagagatacaccgataccatatttgatcttgccatcagaagctgcattcttttcagccacacgtttcttagctgcttcatacagtggacgagctgtcttgaacagttcttcttcacagtatacttcaggcggataacctgtagggatcgtactgccttctgattctttgtaacagttcatttcacggatatcgaaggggtcgattcccatctttgcagccagaacatctatcgcaatctcagatcccatataagactgaggagatccgtaagcacggaatgctgaaccccatgcatggtttgtaaacactgttgtagatttattacggatagaattgattccatagcctgcacctgtaaactgggaaagtctcattgtaagcagatcaccgaattctgagtatggaccatgatccacatagttattgccccagagtgcaagaagcttaccattttcatctgctgcaagcttgatattcataaatgcaggggatctctttcctgtataagtaatattctggaactgattaaataccagagacacaggacgttcaaggatcttaacagcagcgccgatcagagcctcatttgtaggagagaacttgtaaccaaaggttcctcctgcatggttttgaacaattcgtaagttctccattggcacaccgataccatcagcgatcataggcatatgcagatggataccaatggatttggaatgaacagttatcataccgtcttcgtcaatgtaaccataaccgcagtccggctcaagatgaagatgaggctgacgtgaacagtaagattcgatctcaacctgctgtgaatccggaatgctgtcccagtcaaaatcaggacccttgatacagtttgtctcaaagaatgcgttcggaataccgggatgaatctctgccgcatccggtgcgatggcatccattgcattcatatatgcaggaagctcttcgatctcaactttaactgcttctgctgctgcccttgcatgctcttctgtatcagcagctacgatggcaatcgcatcaccaaactggaagattttttcatcgcaaagtacaggacgttcgaaaccgtctgtcttgttgtgttttggaagcattacaagaccattgatcttattggttccgcctgctgccttaatatcttttgctgtgataacacgaacaacaccaggcatactctctgcttctgctgtgtcaatattgaggatatttgcatgagaaacctttgcctgtgtaagagcaaggcgaagtgttcctgatggcatctttaatgcatcatctgcaccaaagtcccaggtacctgttaccttctgtgctgctgacggacggatataatttgttccaacaatagaatcacctgtctgtttgaacacaaggtcttcctttgtcatctcgccgcgcataactgctgctgcagccatagtagcatcgatcagcggcttatagcctgtacaacggcagagattacgctgtttgttaaaccagtctcttacctcctcacgggtaggacttggattattgtccagaagcacttttgctgaaataataaatcccggtgaacagaaaccgcactgtgcgcatccatatgccatccatgcaacctggatcggatgcatatcagaaagtgttcccacaccttcaatggttgtgatctctgcatgatcgggaacacggctcatcttgtagatacaggatcttgtgacttttccgttcataataacattacaggctccacagtgaccttcaccgcagccaatcttacatcctgtaagaagaaggtgattacggagcacctgcgccagtgtctcatccttatcaagaataagtattctctcaacaccattaatcttcaatgtctttttaatcatgtcccattcctccttttaaaaaaattcatttcaatcttactgatcttcaggcttatgtgttccgcacgaatcatggtcagctcccctgcctgtcagatctttcagtctctctattcctctggcggaatagaaaacaatggaagagctgctcccgtccagattctcaccgctgagctttaaaacatttgcattctcataataatcgatgggaagcgtccggctatatacaacccctgtacgctcatcttttacctgtacagtaacttcttttgcggtaatctcaaaaatcttatccataaaaaagttctcctgtccacgttattttatatatccatactaccataattttgcacaattatacaaattacaaataattaatagttggctattttatatattacagacaattttattttgtttcatttaaaattttaactatttttattcttttatatgttataataatatcaaatttgtataatatcattgaaagaaggaggtatctaaatgcagacaggcgccctcatcgtggctgcggggaaatcatcacgaatgggagactttaaacccatgcttcagcttggctccatttccatcgcacagcgcgtgatcaataatttccggcaggccggaatctccaaagtagtagtggtaaccggatatcatgcagatgttctggaatgccacctggcttccaataatgtagtctttcttcgaaatgagaactatgcaaacactcatatgtttgattctgtccgaatcggacttgagtatctgaaagacaaagtggatacggtactctttacacctgttgatgttccgctgttcacagcccagacagtcactcaaatgctctctctggggcgtccccttgtaactccggtctgtaatggcaatcccggtcatcccattctgatccgttccacactgattgattccatcctaagtgatgacggaaaatcaggacttaaaggtgctgtggataactgcggggaacccatgtattatcttaatgtaaaggatcccggtattattcatgatgctgatacaccagaggattatgctgaacttctccgcatacacaaccagagcttgatccgttctgaaatccatattcagctagcccgggaaaaagttttttttgatgaaaaactctattcgctgcttacactgatccatgaaacaggatctgtccgcgatgcctgtgagcgcatgcacatttcctattctaccagctggaacctgatccataccctggaatcacagcttcatgaacctctgatcatcagaagccagggcggtacaaggggaagccatagcgaactgacaccatacggcgaagaatttctgaaacgatatgcccgtttttcagaagaaacacgttcctgttcaaaaaaaatatttgaagaatgtttcggagggtttttaaatgcgtaacctttatctggtccggcatggaaaaccacagtatccggatgaacattcttactgtgtaggacagacagatttctctctatccatgcttggacatctgcaggcagtccttcttaatgaagaattgtccgataaaatatcaggggtatactgcagtcctttgttaagaactgttgagacagcaggccatatggcacctgagcttccacatatcattgtttctgatctgtcagaacgaaatctgggagaatgggatggcctttcttttgatgaaatacgccagagatggccggacatttataaagcgcgtgggaataaccctgatcatccgatcccgggagcagaaactcctgctgcatctggttttcgcttttcgcaggcagttcataagattctttgcgcttctgaaggtgatattgcagtggtaactcatacagatgtaatctcttcttatttacatgcattacattctgatatgtacagcaggcagcagtttcgtctgccctgcggctcttactatcatctggaagtgaatgaaaaaaataatatttctttctctgatcccagttatatactgcctcatcctgaattaaatgacggactatgtctcaggcttcgcaatgctgtttctctgccccgtcatgtacaagctcacagtgatgctgttactgaacttgcctgttgtttatgcaatatgctggaatccaatggttatatctttgaccagaagcttgttcgctccggtgcacttctgcatgatattgccagacttcagaggcatcacgcgaaaacaggcggtgaacttttcttacagttaggttatcctgagatcagccagatcatttcacagcaccatggtctgttggaagccacgctggatgaagcagctattgtatttctggctgataaactgattcaggaaacacagcgtgtaaccatagaaaaaagatttgccgacagcatgagtaaatgcaaaagtccggaagctcgcaaagctcatgagcagcagttagaacaagcccgcaaactgcaggacatgatacaatcactctgccatatcacgctttagttcaggcgggcagacgtacacaactggagcagaaaaatcacttaatttagttaggaggtattttattatatgagaacattatttcagacaataaaacaacaattcctggagggaaacgatcttgtacttgtttccgttacagcatcctcagggtctacaccaagaggtgccggttcccgcatgctggtcggaaaaaacggcagaatttccggaaccatcggaggtggagctgtagaatatcgtgctgaatgtatggcattggatattcttgaaaaaaaggaatcctgcgagcatgaattccggctgaatcataaagatgttgaaaatattggtatgatctgtggtggtgatgttacggcctttttccagtatcttgatcataacgatccgattattatggaaatcacggaaactgctgaaaaattctatgaagagcgaaaagatttctggctgatttgcgatcttctcaccacctccggtgtgagcctttacagtcctgcatgcggtctcatcggaactgccaatgttccttcttctgtattatcttctttgtctctaaagccacaccgatatcacagtgaagattatgatctgttttctgaacagattggaacctcaggaactgtctatgtattcggcggcggacatgtctcacaaaagcttgtcccaatccttgcaagcgttgattttcgctgtgttgtcctggatgaccggccggaatttacaaatcctgctcttttcccaggagcagttgaaacaatactttgtgatttcaaccatctggaccagtatgtttctattacagctgctgattattgctgcgtcatgacacgtggacattcctatgataccattgtacaggcacagcttctcgctacacctgcatgttatataggcgtcattggaagccgtgcaaaaaaagctgctgtatttcgccgtctgattgaagaatacaacattaatgaacaagatttaaaccgtatcatctcacctataggactggagatcaaagcagaaacaccggctgaaatcgccatctccatcacaggacagataatccaggttcgcgctgacagaaaggatacatcaaaatgatggcaaaatcagtatataaaactgtaatatttggtgccggacaaattggacaaatgaccgcaagacttctcagcagtccctgtcagctcctgtgctttgctgataatgacccccataaacacggatcatatattggaaatattccagtctgttctccggatactgcagcagcacttctcccggatctggtcatcctgggagttctggatgaagaacggcgcaattctatgataaagcagatggaaaacttaggttatcacggaccttttcgtgatccctccgtccttcgcatgtttgacgcacgggttgctgttatgcgtcttttatctgagcagatctatcaattggatattccgggaaatgttgcagaactaggtgtttttcgaggtgaattttcttccctgatcagtgcagcctttccagaccgaaaaatccatctttttgatacttttgagggattttcagaaaaggatatcacaatagaagcctccggtaatctgtcccgtgccaaaacaggtgatttttcttctactgatattgactctgttcttcatgttatgcctaatcctacacgtactgtgatccacaaaggatggtttccggataccttttccgatgtcacagatgaaactttttgttttgtatctctggacgcagatctctatgctccaactgcagccgcacttcctctgttctatgaacgcctggccaccggaggagttctcctgatccacgatgtgtacagtacacagttttccggatgtcgaaaagcggtcggggaattctgtctgaaaaaccatctgtttgcagatcctgtatgcgatctgcatggaagcgcaatgatccgaaaattataaaaggaaacgccggaaccggtatttaccggaaccagcgtttctttttcatttatttattgtatagcccttttccacgtccatgcctaacctttataaagttcctttcagaacattttccaactgttcatcggacagatcaacatgataaaaaagatcgaaaaatttatgtatttcttcattgatatcacatttaatatattccggataaatcaatgctgagaaccatcgcataccgatcagacgatttggtcctgccggacgatccacccagctaaacggtgcattaggagttccataaaccttttggtcctgtactgcttttagtgaagcataatcaggattgctcaggatatcttctgctgcagaatttccgcttttatctgcctttggttcaccatttacaacaatcacatccggatcccatgcaagaagctgttctgctgaaatctgaacacgagatccatctcccaattccagatctgcaacattgactgcattgatggcatcaaggatctgtgcatgctgggatcccctgggtgcagtttccagtgaatcctctccattaccgaagtatacactgactttcttttcttctggaatatctgaaagtgcattaatatcagtaaatacctgctccgcatactgagcaagctcttctgcatgatcttctacgccaagaagttcgcccataaaacgaaaagcttccgcagaattattaagctcattgtctactgcaacaaccggaattccaaggctttctgataacgcatcgcaatcagaaaccattgtatcattaatctttccactattaatagcaattgtaggattggcagcaattactgcttcataattgacagcatcacccattccaaaattaggaagatcctgatatttgtccagaataatagatttctcaacatcattcagttcataattccacccaagaagcttatccggtgcaaccatatacagaaaaattgcagctaccggacctgctgaaaaaacagattcaatattttctgctacagggaccgttacttttcttcctgccatgtctgtgatctcacgggtttcagcagtttcctgcgtggcatcctgctccccactctgcgccggctcttcagtagcagccttcgtttcagaatatcctgttaaaagactgactgacatcaccagacatataagcagagccaaaagttgtctgtgctttttcataaactttctcctttcttttctccgcattactcataattgacgcttattgaaattgactatacaatttttaagtattataatgtatatgcgaatagtttttaaaaacaattcgatttttctgagtataacaccgtaaatttgattagtcaagttacaaggatgaatgattatgaatctgacagctaatgaaaaaaatgccgccgttgcccggcaaaaacgatatgttctgctgttggcggttatgctggtacttttatttatcattatagtactctcattctgggtgggatattatccgcttacaccagtgcaggtactaaatgcatttttatcaaaatttggttttaaaggagatattttaccccaggcagttaccatattctggaatatccgtctgccccgtattctgtctgctttatttattggtgcttccctctcggtagcaggtgcaacctatcagggaatgtttcgcaatccactggtatctccggatatccttggagtttcttccggtgcaagtctcggagctgcttttgcaattttaaacggagcttccaactggatgattcaactttctgcttttgcaggtggtgtagccgcagtagccgcatcctatcttatcagccgaaaatccgcacattcccagactctcagtcttgttctgaccggaactatgatcatgtcactctgcaatgccggtgtcacaatgatcaaatatgtggcagaccctaatgatgttctccaacaaattactttctggcttatgggcagcttaaccaaaaccacaaccaaatccttttcctggagtgttcttccgatgatcattggattaagtctgatttttatttttcgatggcagatcaatctgctgactttggatgaagaagaagccaaaagtttaggaatcaatgtgcgtaaatatcgtctgatttttatagtcgcttccacattactcagcgccgctgcagtctgtcttggaggattgatcggatgggtcgggctgatgatcccccatctggcacgtgcactggttggcgttgattacagaaggctgatacctgcaagtgcgatccttggtggcggatacctgatacttgttgatgacatttcccgttcccttttgtccatggaacttccacttggcgttgtcacaagtatcatgggcgcccccttctttatctatcttatcatcaaacgaaaggagcgcgcgtaattatatgcttctggaaattgaaaatgtttttggcggttacggcaatggtgatattttaaaaggtatcagctgcagcgcagactatggtgatgtgctttgtctgcttggtcctaatggctgtggaaagaccactctgttccgcatgatattaggttcccttcctgtttctaatggaaaaataaagatagccggaaaaaatattagtgactttacaaccaaagcactggcaaatatgattgcatatattccccaatatcattcccctgtatttgcctatacagttcttgatatggtaattatggggcgtgcttctcatttctccgcatttgaaaccccaaaagagcctgatcaggaagcagcttttgctgccttggagaaagtaaatgccctgccttttgccaacaggaaatatacttccttaagcggaggacaaaggcaattggttttaattgcccgtgcaatctgtcagtctgcaaaaatcttcatcatggacgagccagccgccaatctggattatgcaaatcatcagcttctcatggaagtaatttcagggctggccaaccagggatattgcattattatgtcaacacatagtcctgagcatcccttttccgtgggaaacaaagttcttctcatgaaatccggaaaggttatgggattcggttctcccaaagaaatcattacatctgaagccttacaatctgtttacgatattgaaatggatgtgataactacatacgaccgctatggccgtgaacgaactatctgtttaccggtaaacagctcagccaaaacagttcatgagaaatgatacgtgggttacaattatggaactattataaaataaaatgaaatgggactttactatgactcaacatatatttttaactggcaaaaaacacattggaaaatctacattgatccaaaagatattggatgattataaaaaaaccgctgatggattcctgactgtccgcacaaaaaactatctaaagaatcagtattcagttcatatgtaccatctaaaagagaaggaattcccaaacgaatctaatcttttgtttttatgcggaaaaacagatgaacacactgccgatacctttgagcgtcttggatgcaatattctttccatgtgttctgactgctctttaattgttatggatgaacttggtccacatgaagcagacgctactttatttcgtaaaaaaatcctaaaccttttggatgggcagactcccattttaggggtattacaggaacctgcagaatctttctggcctgaaattgtaaatcacccaaaagttgaaatcattacaatttctgaagacaatcggaatgacagagctttactcaattacattcaatgtaaaatttcttctccttaatgattactcccggggctattccatcggaactaaccaaagggtcaagtagccttgtcaagtaaaaaaataaccgctagaagccttgatttctagcggttctacgtgcgttagaggttgctgcgtgccagtggcacgcgtttagcaacgaccggagcgaagcgtagatcgaacccgttcgagtccgacccggactcgaataaaaaataagacagtgcatatacactgtcttattttttattagcgtgcgttagaggattcgaacccccggccttttggtccgtagccaaacgctctatccagctgagctaaacgcacatccttgtgaagttcttatctcgtgtccctcacaacaatgagtattctactctatactggagcatttgtcaacactttttttgaattttttatttttttcttttgattcgcaaaattataacaatttacaactattctgtaatgatatcagtacacaggtacaccaaaataccatcgcagtcctgttttcattaattccgccgcaaagcctcgatcgggctcagttttgctgctttcttcgcaggataaattccaaagaatactcctactgcgcaggaaaacaaagtcgccgccataattgtactcaggctgattcccggagtgatggacattcccatactgctgcttatgattgaacagatcacatatccgccaatcacacccagaacaattcctatcacccctccaatcaccgtcagaattgccgcctctgccagaaactgcatcataatagaagaggttttcgctcccagtgacttacggataccaatctctctggtacgttctgttacggaaaccagcataatattcataacgccgataccgccaaccagaagggaaattcccgccacaaaggagataaaagcagtcaccatatccagcatctgattcatagagctcataatatcctgaaagctctgtacctgaaagtaatcttttcctgcacactgatgtcttttttccatcagttttaccactttgtcagcaacatcctgactgtttaagctcttatctgcctgcattgttactgagaaaaagtaatcagatacaccggtgaattcattcattgtagtatagggaacattaatagtcaccggcattccctcataagtataactgacaaaggttccattttctttctgggttgtcaccccgcagatacgaagacttttggtcagtccataacaattgacatctacagtcattccaaccacatcatctgtgccaaagagtctttttgcatctgcatcggaaagcacacagacattttttgcttcctggacttcattttccccgaaatatactccatgcttcatggtggcattatttaacagctttgcatccggtccctcacccgtcagcataagagaaaaatttcccttacctgtggtagtttctccactgaatgaatccgaaacatttactccttctataccgtctaccgcccggattgcttccacatcatccgcagtgatccactcctcatctgtctgtgcctcatcgctgacactgatggcaatctgcccgccgccgatatcatcaatttcactgttcatctggttcttggttccttcacccacagatacaatggcaattacagaagcaatgccaatgataatgccaagcatagtcagaaaagaacgtcccttatttgccataatgttatggactgccatcttgatatattcatacagattactcatcggcatcctctcctgtctgttcaggaactgcctgtacttccattccctctgtgtaatcacccagatctgcgattacttcttctccttctttgattccgtccgtaatttccacataatcctctgagctgattcctgtggtaatatttctctttgtcaccagtccatcttctatcacatagcagaaggagccttcttttccgatattgaccacttccacaggaagagtcaccacatttttcgcagaagccgcataaatcttaacctttgcatctactcccagaaaaatatcttcatctggattatcaatgcttactgttgctgaaatgaccggcgttcctttttcattctgcaccgcaatatgactcatttttgttacagtaccctgataagtattatcccccaaggtaatctcaacagactgcccctctttcactgtattataatcatatttagagagagtcacatccacacttgccttgtctgtattctcaatagtaaacagttccataccctgagtaactgctgctccctgcttaatatctgccttggatatgattccgttaaattccgcggtgattcctttctttccttccttcaccagttcctcggctgattttgcgtccagttcggaaagattatctgttactttcagtttctctttttcttcttttgtcaggcttgtggaatctgcctctgcgatagctttctcagaagccagatctgactgaagctctgcaagttcatcgcttgctgtctcaagtgcactttccagagcagaagtatccgcagttactgtcccgccatcacttccactgtaatcatatccgtaggaggaagaatcttccccatcgctgtcatctgcatctgaaccgtctgaaattccccatgagtaatctgcactgctttctgtgaaatcagaaagtaccggcattttcggtgtctgctgcttaagatcattataagtctgctgtgcctgctgcattgcgagctgtgcctgtgttcttgcagcctccgcattatccagagcctgtgtattctcatctgaagggtctgcctgccatgttgcaaatgccatctgatatgtggtgtctgcctgattataatcgctttgtgcctgattatactgtgcattcagatctgagagctgctgctggtactgcggaagagtctccgtcttgtatgtataaagtgcggcctgatatttactctggatttcctcctgtttctttgcctctgcctgggcttttgcctgagcttcctgctgctgtgcctgagcctgagctgctgcctgtgcggatgcctgagctgccgcttcacgctgtgccgctgctgctgccgctgaaatctgtgatttcagagacgagacataagcttttttatcctttattttcttctcaagctcctgaacattctttttggcatccttctgcttcttctctgctttgtcagatttatttcttgtatcctttgtatcatactttgttgatttcagattcagttctgctttccgattatctttctccagatcctctgtattaaactcgatcagttttgttccctttttcaccacatctccctgggcaaaagaaaccgttttcagctctgcatttacaggagaataataggtcttctcctcttcacttcccactgttcctgtagcatctacaatttcctcaacatcacccttctctgcaattaccacctgaacctgcgggatctgattttctgtggaattcctctgacctgctactgtaactccgccggcaacaacgagaacagccgctgctccaataataattttctttttacttttcttttttttcataatatttgtctccttgtaaccgggtttatgcatccagctgattttttatatattcttctttcccatagtttttattgataaaatctgactctatctttccatccataattctgactacacgccttgcctgagcagcaatcccattatcatgtgtgatcaatatgaccgtttttccctgctcgtgcatacttttaagaatctgaagaatctccttactggatgcagaatccagatttcctgtaggttcatctgccaggatcaccggtggctgggccgcgattgctcttgcaatagccaccctctgctgctgtcctcctgacatttcatttggtctgtgatccatacgtttctcaagccctaccatggtcagtgactctactgccagcttatgtctcgtttttctgtctacccctctgtaaaccagcggtagttccacattttcaattgcagtcagatttgagatcagattaaatccctgaaaaataaatccgatctcccggtttctgacttctgagagttcattatcttccattgtggacacatcagttccattcagaaaatattcgccggatgtaggcacatccagacagcccaacatattcataaatgtagactttcctgaacccgactgtccgataatagcaacaaactcacccttattaatttccagattaatatgatccagcgcccgtacttcattctcgccgggattatatattttacacaaatcttttactctgatcagcgcttcctccatctttccctcccgtctattaaatatcctgctccaatccagatcttacagaatcgcaacctgtctttcgtaagatatcagaaataccttttacaatcataacctcacttatatgttaaaagggcagcgcttcagttttccaaaagctctgcccttatctgcggaatctgcaagtctctgttatcaaaaacgatacagcttccacgatttcttcatatttttattccgcatctgcctgactttttatgcttccagcagaaatgccttatatgctttcttagcttcgtaaatatctgccttacttgtcacttcccatggtgcatgcatactgagcactgccacaccgctgtcaatgacttccattccataaagcgctgcgatataagcgattgttccgcctccgcctacatcaactttaccaagctcagctgtctggaacgcaacttcatggctgtcaaaaatatttctgactcttgccacatattctgcatttgcatcattcgagccggatttacctcttgctccggtaaatttatttaatacgatacctcttccaagataagctgcattctttttctcaaatgcctccccataagccggatcgtagcctgcacttacatcagaggaaagcatactggaattcttcagagttcttctcaatctcagatcactgtagcatcccattgcatccagaagttcagccactgcgttctcaaagaaacgtgactgcataccggtggcgcctacgcttccaatctcttctttatcagtaaacagacagcaggaagtgtgtttcggggtgtccatctcaagcattgcaagcagagaagtatatgcgcacactctgtcatcctgtccataggcagcgatcatacttctgtccagaccacactctcttgcctttcctgccggtacgatctccagctctgcagaaagaaaatcttcctcttccatatcatacttctctttaaggatattcagtacattctgttttactgcctctttcttcttatcatcttccaggtctttcagtggtctgctgccgatcagaatgtccagattctctccctcgatcacttctgccgcttttttctgcatctgctttcctgcaagatggatcagaaggtctgtgatatatacaatcggatcatcctcatcctcaccgatatttacttctgctgtacttccgtccttctttaccactacgccatggattgccaggggaagagtcacccactggtatttcttaacaccgccataataatgggtatccagatatgcaagatccgtatcctcatataatggattctgtttgacatcaagacgtggagaatcaatgtgtgctcccagaatattcattccctcagaaatatcatcctgtccgatatgaaacagtgcaatgatcttcttcattccgactgtataaactttatctcctgctttcagtttctcacccttcgcagtcttctcttccagagattcataacctgctgcccgtgcttctctgatgatctgcgtcacacattcacgctctgtttttcccacattaagaaaattgcgatacgcttttgcaacctgctccagttctttttcttctgcttctgtataagaaagccatgcatttctacgttccatttactgttccgcctttctttatgactgtcattcatagtattgctttgataacggtaactattcatcagttcgctattatgtaatggtattgaacaattacctgtttttcattataaaacatcctctgaaaattttccatatgattaatatttatttgtcagtggacattatgattcatttccgctatagttgatggcaggttaatgtttctcctctcaaattcattatttgcgaggattattataaaaatatctgcaataccaggaggttctgtcatgaaaaattcagaggaactgcgtcagcagcttcgttccataaaccgcaaaagttatccggcatataaagggctgaaaggtctgtatcattttggaaattatattctgtccatcgaccatgtgcagggagatccttttgcttctccctctcatgtcagcattcagatttcacacagagatgccggatttcccgtcgaatattataaagatacacttaccgggactactctttgcgactatcttacacgtcagtttgaaaaacaggtcagtcagtacagctttcgtgcaaaaggctccggcaaaagcggcctgctcactgtcagtcattgtggtcaggagattctttcccggacagcctgtgaaataacagaaaaaggcataaccgcccgcttttttgtgggcttccctgctaatggccgcacgatcaatgccactgaactggagaaaatcctttttgattttctgcctgtatgcattcaaaaatcctttttctattccagccttaatgcaaaggaattacagaattatatagagcttgcagaggatcaggaatttatccgtcagacgctgcccgcaaaaaatctctgcgcattcatagccgacggctccatcctcccaagagaaagcggtatttcctcccgccctatgaaagcttccgttccctttacttctccggacagtctgcgcatttccataaatcttccccataaaggaaaaatcacaggcatggggattccaaagggaatcactctgatcgtaggcggtggatatcatggcaaatccacgcttctgaatgcacttgaacttggtgtatacaatcatatccccggagatggacgtgaatacgtgatcacagatgcaactgctgtcaaactgcgttcagaagatggccgttttatcaaggatgtggatgtttccatgtttataaatgatcttccaaacaagaaagatacccgctgtttctctacactggatgccagtggaagcacttcacaggcagccggtatcgcagaaagcatggaagccggaagccacctttttcttcttgacgaagacacctccgcaactaacttcatggttcgtgatgctttcatgcagcaggttatccagcgtgagaaagagccgatcactccgtttctggagcgtgcagaggatctttataaaaaagcagagatttctacaattcttgttgccggaagttccggggcattctttcatattgcagatacaattatccagatggacaattacgttccaaaagatattacagcttctgtcaaaaaattatgcagccaatatcctctgcctgctgtttcagttactgattttcagcttccgcacagccatcgcattatgagcagacctgccgaatcttctaagcaccttagacataacagccgtggaaatcattccgattccggtgccgcaaaacctgagcgcctgaaaaccagaatctccggaacagatggcttctctctcggcagacaggagattgatctccgctatacagaacagcttattgacgcagaacagaccgctgccttaggtctcctgctgaaatatgcagttgaacatctggcagacggcagacgtaccctgcctgagattgtgcagtttctctggaaaaatctctctttacatggtctgtccttttttacggagaatcaaaaaatttcctgtggttacgctactccccgtattcaggaaatttatgcctgtcttaatcgttacagaggtttataagaaagaatccttcttcagtgacataataaaatcaccgcttctccgtcgatcttgtcggctaagcggtgattcacgttcattttacactttttagggaaaggaaagattttctcttaaggtacgtcatttccttaagatgtaaatatcataacctataaatgtgagagaaatttgtctaatttctaatataattataaaatttataaaaaaactgcaaaaatttgttactgttcactccgttctcagcaacacaaaaattttacacttttagaaattttgtaggaatcagttgcatctccctttcaatccgttataatattagatgtatgtaactatttaataatcaaagaaatctctgcggaacagttatctgatatagagctgtataacacaacaaaggttaatacatcgttttcgaaataactataccactcacttgtctgcgaatccgattgcacaggtataaaagcctcagcgtagcccgtacgcctgcgtttttatacctgcacactcgaatccgcatcttacgcgattggtatagttatttacgaaacgatgtaccaagaaagaggaaaataaatgtttagaaaaatagataaaaccagtacattcaacgatgttctgaaacaaattatcgaaaatatccaaaacggagaattacaacccggcgatgcacttcctgctgaacgtattctggcagaagaattcggaatctccagaccagcattacgagaagtcctgaaggctctttccctgctcgggattactgtcagcgtacatggcggtgccaattatattgcaactgatcttcacagctgtcttactgaacctctgtctatcatatttcaaatgtacaacagcaaaattcaggatgcattgcagcttcgaggcgcactggaaagcaaagctgcttttctcgccgcccaaaactgtacaccgctggatgctgctgaactccagcttatcattgccagactggacagcactcaggatgaaaaaatccgcggtgatctggatcgtgatctgcatctgaaaattgctcagatttctgccaatccattaatactgagtgtcttaaatgcctctgcacagattaccgaaaatatgatcgttggaatacgttcctatcttatgcagaaaaataacgatgcaccggagattgattcccagcacactcggcttgttcaggcaataaccaataatgatgcacctcttgcagaaaaagttatgaacgaacatatgcatactatagaatatctcctgaatgaaattacgtctgacaacctcacaatttctgataacgttcaacaaccataaattatcctgatcatgttatcaaaaattatatgtcagccccacttatcagacctatggcaatcctctaaaatcatactttatctggagaattgccatatctgctttacaatcattctgtttcttcactgaaaatctcgcacatcagccttgcccctgttttaaatcccatggcaaaactttcttccagctcctgtggatatatttccatatgtttattcatcagttcatccagttcttcagcaagctcatctgtcagttgaactctcaatttctgatagcactggtatgccgcctcttttttcgctttacataaatcatcatgtatttctgacatttcattttcttccccattgtcattatccatatacataccatacaatttccgaatcacattttccatatatttacccagtctctctgaaaatatttatttactgcattctagagcgtgtctgaaaaaggctttctgcaagatgtgcgtcacaatttgtgggatattttgcccggatgagggcgccgtagcgggctacgacaactgaattcgggtgaaatatcccgcaaagtggggcgtgcagattgcgggaatgatttttcagacacactctaatgttacaagtattccccacatattcataactcactcatactatcgcatcaaattaattcttacaacagtctcgcaggataacctttctatttcaaagcggagaaaagtaatactaatatgtattataaatttgtgttatatcaatgtcaatcctgtgtaactatactttatatcataacagtgattacggagatcaaaattatagcaatcctcgtaaataatgcatttaagacagttcagcagagtgcgaaagacaaggaagatatctgcaggcgtgctgacgcacggcaaagatatctgacgcaggatttcacactctgatgggctggcttaagatgcattatttcagaggattgctatagaataagcaatatcaattatgataaccattcactaataaatgtttatacaggagggataatcatgccaaacgactttattgtccggccaaaatgtacagataaaaaagaagacagatcaatcaccatgaccattcgccttgaacgtgaactgcaggaacaatatgatgacttgtctgccaaaagcggacgctcaagaaatgaattaatgtgcatggcactccgctatgctcttgataatctgaaatttatcgaataaattatatgtatatgcggaaaaaagtccctgaaaatatctgaataaatgaatgattatttaagtattgtatgaaataatgttataattgacgaactaatactcatagatatacaattacttcaataacagcaataaattatctgacattatttaccatattactttatacagggaggtttttttatgcattcattatcagattctactcagggatacacttacaccattaaatggatgttcggactgccggaagttatgaaatccatgcacgatatgaatattcatgaaggtagcacgattcgtgttctccgcaaattccacgattctcttataatttcttctgcaaaccgaaagattgttcttggaaatgaagttgcagacagaatacaggtatagtgctttatatttaaatgtgacgaaatttacaagacaaaggccggataaatgctgtaacattcagcatttatccggcttattcttatctttgttctatcagtcgtcagttttccgtcttaataattgttctctgaattataagaagaaagagacgcagataaggtatacaactgtaaacattgtggtgaacctcacatgactaaagtcacatgcttccagacgctttaggcgtcagactgaatatcggcggatacgcctgtaacttaggtctgcacaattatgcgctttttccatgccggatacggcaggtttccacattacaggtagtccgctgtatatctgcctgtatctatgctgcttttaagagttccatttctgaatggagtttcctcagatctgcatagacacatgaagttctacgctttacaggagggacttttgcctccagcaaagacctttccgttgccggaaggggttttaaaagttcccttataaaatatctagctcctatattataggatgctgacaggtcacaattatatcgttttcctgtctgaaaagtacagaggctgtgattttcccggtcacgtgttaccgccccggaaccatcataagccagtctgctggtattccatgcacagattcgggatatccgcatctctttcctgtgtgcctgatgttcacagcgtctttggatatcccgctttctccacaggtgcagtttctgttttttctttcccgatatcttcccctgcaactccagatattcgaacacgatcacatctgcatggttttcttccgcatatcttataatcgcacctgcagtctttttacccagttctgtgttcagacgtttcgtatatgcccatcttccctgtgtctgcgcagagccatgttccctctggaatctgcggatccgtcccagtgtgcggtacatccggtctttttcactgggatgatctatgaatcttcttcccaggacagttccgtctgagcgcatgatggtacagaccgcatcagtattgatccccagatccacactgcagatgatctgttcttttaccggtgttttcgtcagtgttacttcttctgtacaggaaaaacgaagaaaataccggcggtgtctcttttccaacgcaggggccgatgtcttctttcctttccagttcctgcgaagatattccatatcggtacgttttaaatatacacggaaccatttccagtcatgcccgtcgtacagtttcagatatgcttcatctgttccttctgctccttcgcggtacatcacatcccggtaaaagaccggcatggcatggttcctgcaggtaagtttcggccttccggacagcactccggtctctttccactgccccagccgggtctcatacgaagatacacttccaagcgcatgctggatcgcggacctgcggaggtaagacggcatcttcggaaaacgaaggtcaaaatcaaaccgggctgtgtttttcttcgtcatgtgcaccatatgctctgcggtattaaaacgcttttttgtctccggaatcttcctcagttcttcccagacctgtgcgtagatctctgtcaggtaaccgactgcctgacgataaatctccattgtctgacgggccgggatattctgttttcgtatctccacaccatagctggatactgtccgcatcttcttccacctttcccgcaaaaaccaaacgtttccggaatgatccctgtattcagggctttctcttttctttttccttctggccttcgatataggcagatacctgctcacggctccggtcactgactgtaacggcataataagacgggttccacaaatgtcctccccacagttcttttttcagctccggatgtaaaaggaacatctgacgtgcaagattccctttcatgatcttgatcatatctgaaatataaaactgcggccggcaatccacaagcatgtggatatgatccggcatgacttccattgccaggatctgaaaccgatactcttctgccagatcctgcagcatctttttgcattccaggtcgattccgtgtctgtattataccatatgcatttctttaagtaaacatttgttctgtatattttttataaaaattgcgcgtctaactcatcactgaagtaacgagaatgcgacgcgcagttattcaagtgtgttcaaaacctgtaagcaaaaaaataagagaaacgctacaaaatcaacgtttctcttatttacaatcatgccgcagaccggaatcgaaccggacagcacagcccagaaacgttgaaagaaaggggatttcaggtacttcatcagcggctgtgttcaagtgtgttcaaagaatttctgttattttatctatattcttcaacctcttaagtttttcaggaaatactgctctattattccttatttatttgtactttatgcaatacaatcttgatatgatagtatctttatattaaattataattactgctccatcggagaggtactctggaaaaaatatttttaaattacctgtatccatctaactttaaatataatttcttcaatatttgcaaatgctgtctacctcctacaacggtatcgtggtacaattattttaccaatatttaccatcggaggatattgtctatgaatgagaatattaagacaagtgttcacaagtactacaataccaaagttcccattttatctcattggtcgaccaccagaaataaagcggctacattgtcaccagaagaatatgaatttctatacgagattgtcactactaatccggtgtattcaaaaaaagcaaaattattgcaggacaccttacatcattaccaagacagaaaatctgttaattcgcctctgcccttaatctttaagcaggctgtttacttattagcttacgacttatgcaggggtgactattatgatgttgctcagaaaaaagctcttgaggatgtaggacttgctcacaactcattcagtaaatggtggatgcacccaaaagaagattatttattagcgcaacactataaaaatgaaatgcctctttcgatgcccatctattatcagggtaagaaaaattatgcgttagtccatctggctgatgagctcagtaaacaaattcattataagacattcgtagatgtcttttgtggttctggtaccgtcacgttaggaattcaaaaatatcagaaacgaaattattacatgaatgacattgctgtttcccagacaaaccttattaatgttctacgtgataatagtgaagaatttcttcaggctctctcggaattagtggagaaaatcagggagttttcagatgaaaccagcccagacttaactgcttcgtttatgactctattccctgaaatttcaaactggaaaattattgctttcaaaataataaaccaaacactttcgatccgaaaacataatgaacgtatagagaaagatgaagatgaagataaaaagaaaaaaccagtgcctagaaatattaaagacatttatcgaactcttcccgatatatctatcactgatatatctgttgcaaatatagaacagtatataagtatcgaacgtattaaaaaatatatggaagactcctctacaaatatacagcttgcattctctgaagggttgaatgttttctttaaaaaaatttttaatgtcatttcagacagtccaatagcatatgcagtagctactgtatataatagtactttttcatcccgtagaaagccccaagaagattatcttgaaacattcttctcaaccctgtcctactggaaaaaagtaatcaaggagttccaaagttttaagatctctacccttaataaatacgattatctggctgtagaggatttcaatagtgaagatactctcctgtatatggattctccgtatgctgctactgccggttataaaaatgccagttacaagattgaaaatttccagaaactatgtgataccttaaaaaagtttcgcggaaaatggatttttagttgtagagcaggtatcaattataagagttgtgaggaagacacagatgacagtatagacacagaagacacagtatatacgattgcagataaagtcccttatatacgaaaagttctggacatgtataaagaattagctcctaatgttgcatttatcagaccatcaagcgttacatatgaagtctatttcgcacagatggcagtccccaaagaagtaatgttttttaattttcaagctacagaacctgactttagcgcattttataaatttatgcacaaggatggagaaaaacgttcaattggtgctgcgaaaaaatctgtttatcaaattatcagttatgaggaattttatccattagctcaagaaggtttagaccgtatggatggtacacgtgcttgatttcagcacaccgcacaagattacagtgcggtgtgtttttgtttgtacaacaagtacacaattgatatgagtggggtatcagatgtacacaaattcatatagttatctttgtaagacttacatgttgaaccacttcctcctaagaggtatagtacacacaccaaaagaggaggacacagtcatgaatgaacttatgaaacagtatactttcggagtagaaattgaatttacgggtatgtgccgtaaaagggcggctactgtagcatcgaaatatttccagaatgaggcagagcatatcggtggtacttatgatgcttactcagtagcagatcagcagggaaggacatggaagtttatgtatgattccagtattcatgcacagcgtaagaatgggaactgggtatcagacagaacttataaagtagagatggttacgccgatcctgcactatcctgatattgaactgttacaagaactagtcagacagttaagaaaagcaggcggtctggtaaatgacagtacagggttacatatccatgttggcggagaaagcttcacaccacagcatctgcgtagcctgattaatatcttcactgctaaagaagatcttctggtacaggctcttaagattgagccagcacgccagaactactgccagaaagtaaacaggcagatggtggaagtcatgaataagagaaagcccagtacattggaagaattcgcccgtatctggtacaaggaacagaatgcagaaggtacaagaaatcagcattacagttcatccagataccatatgctgaatctgcacagccagttctatcgtggcaccatcgaataccgtttattcaattccacattacatgcaggaaaggttaaggcttacatccagatggtacttgctattactgctcaggctcagacagtaaaatatgccagcccgattaagagaagtaccgataatcctaaatatgcattccgatgttggatgctccgcatggacttgatcggtgatgagttcaagacctgcagaaagcatatgcttgcattacttgatggtgacagtgcatggcgaaacggagccccaaaataaagtacaggcagtggggagaaaactctccccactatacgaaaggagatacttatgaattattatatagcttatggaagtaatttgtattcagaacaattttaccatcgatgccctgatgcagaacttgtatccagtggggtattgagagattatattctggcattctgcggcagtaatgggaatgcgttccttacagtaaagaaacagtcaggatgtgctgtccctgttgcagtataccgtattagtccaagagatgagcgttctctggacagatatgaaggatatcctaacttctatattaaaacacaggcagtagtggaaatagatacaggtaaaaagctaaaaggaatgatgtatgttatgaaagaacagccgtatgcttatccatctgagtcgtattttcatacctgttcaatggggtatcaggaattagggtttccagtagatgttctggaagaagcaatatcctatctggaaaccagttctgcagttgggcataacctgcagttttaccgtaaacgagtggggtattcacagtctaagttagagaggttatgtggcttcagcaagggtaagatctgtaaactggaaacaggcgagcgtgacctcagaagggtatctgccgatgtttacattaccttgaagcgtaacctgcggtttgatgactcttatatttttctggaaaatcccagaaattaactgccctgttccagtagtgtcctaaccctgctaccgccctcattcagcaggtacagattccattttccataaataaaagcattcatctgcaagcacagcagtaactgccctaccgtctgcatatatataggaaagaatactttcccgttctcctgcttttggtaaaaaatgagagatatcttcgcagaagggaagttgtgcagtgctgtctggcagatggatgcttttttctcatttcaggaataaggcacaggtttcaacctgcctactgtcctgcaggaagaggcatagctgctatctgcaaaatgtatgatttgtctgttttaagatattgtttttctttgtcagtataaggatttccgtatatatgagtggggtactgatattattattttgctgttcgatatgcttttcttctatccttatccattcttatggattacacttagaaagcaaccctgtttagatttcatataagattacaggatgaatagataacagttattgctacatacatagttcttacaacagttattataaagacagtaaatacaacaacagtcctatataagacattagtaatgaatcctaatacagaataggattcttacatgaacagtcagttgcagaataatggatatcagtagataagagaacagcaaaattaacagcaagattaaaagtttacagatagagagtcagtaataaaggtcagggtcagtcagggagcaagattaatattagtgagttttattttcgagtggtgatttcagccatacatagtattaagaaatagctgtattgttaaggcagtgcagagatagtggtcaggatatatttccagataagttgtactggttctgcctatactcaaagtatgtagggtagataagatttccatagagagaggagagcagttatggttacagagagagacagaaagcaaagggtaagggatcagtctcagtaagggtagatgattctgcatttcgagtatatccagttatgtagatactctcccgatatgagaaaacagatacagttagtagctacagcaaaggcagagaacagatcagttaagaaagaaatccccagcaatgccatacagaaatccagtaggtatattctcccaagtataaaggttccactggtaacaggtgtgatatagggtagctgataagcacagattcccagagagtacaggcaaagtctgagaagtacgaatggggtattcaatagccagtctgataatagagggtactgaccagataggtctgatatctaatctcctgcttctacttacaggatagagagcagatcagaaacacaggtatgattccaagtagatacaggcagagccatatatgagcagggtattccaaggatatgtagagaacaggggtactgaccagataggtctgatatctaatcttctgtttatacttacaggatagagagcagatcagaaacacagaaaacagttcgagtatatccagttatggtcatggatgagtagggtattttaagattatgcagggaacagggatactgaccagataggtctgatatctaatcttctgcttctacttgcaggatagatagcaggtaagaaacacaggtatgattccagatagatacaggcagagccgtatatgagtagggtattccaatagcatccaagtatcaggggtactgaccagataggtcttaatatcctgattctgcctatacttacaagagatgtagtagataagaaacacagaaatcatttcgagtatatccagttatggtcatggatgagtagggtattctaaggctatgcaaagaataggggtagttgaccagataggtctactctcccatttccatcatgtacttacagaataaagagtatccaagaaacacagttatgaatgataagacaggcattcaggattaagtagtaagaataaacacagtctatatagggagcatacagttccagaacagagagaagaatgccgtatttctgcggtatccagatatgagtggacacagttattaaatattagccagtatactgggtagggtattgatagacaatacattgcagtgttacatatcaggaatacgatagtttctggtaacagatcgcagtagtccggcattattccctgttataagtacagatttcaacattcaacaatacataacaaggtgcaagtaaacacagtgatatttttatcgggtatcagtagatacagacatcctttacttgataagtggggtattattctacagtattacatccaacacagttatgtgttacattgtcagaatactttttcagatattagttgtagtttagtagtaactatggtatgctacaagaaacgatatggtaatttctatagagtgtattttcccatttacctgcctgagtattcagcccccaccatagggtgtgggtacttcattctcaggcaggtgaatggggtattgtatagtaattacaacagatcaacagatgtaggacggattttgcggacattcaaaataaaaaagaatgtggaggtaacagacaatggcaaaatcattatttgaggaactgggcggcaaatacgaaaggcaaggggattatttgataccgtgcttaactgtacccgccgaagaagaacaggcaataggcatctgggggcaacggcatttagattatctaaaacagtaccgtaaagttacatacaccaatcttcttacaagcggcaggctaaacgcctaccttgccgacatcaacagacaggcacaggaacgctttgaaaggctcatagagggtatgaaacaggcacagggcataacggaacagctaaaggcagaaaacgccttagaatggacaggatgcctcaataacataagggcttgtgcgagggagattgtggaaaaggaaattatttttgcataaacagatgattagtggcagggggaaatcctgccgctttttctgctttagtttgtcagcttgacaaataaagcttgacaaataaagggttaaggaatataattagattcagtattatacaaggagttaataaatatgcggcaaggtattcttaaataaactgtcaatttgatagtgggaacaaaaagtagcagtcccgtttcacttttaatatggggcttagttttttgtacccagtttaagaatacttttatcatgtaattttatatgcccgaaaacatataagtgttttggggctattggagttatttacccagtgataggagtatttatcactgggtatttttatgcccttttttgggtgttgataggaggaaaatcacatgaaaataattaacttaggcattctggctcacgttgacgcaggaaagacaacattaacggagagtttattgtataccagtggtgcaattgcagaaccagggagcgtagataaaggcacaacaaggacagatacaatgaatttggagcgtcaaaggggaatcactatccagacagcagtgacatcttttcagtgggaggatgtaaaagtcaacattatagatacgccaggccatatggattttttggcggaagtataccgttctttatccgtattagacggagcagtattattagtttctgcaaaggatggcatacaggcacagacccgtatactgtttcatgcactacagacaatgaagattccgacaatctttttcatcaataaaattgaccaagaggggattgatttgccaatggtatatcgggaaatgaaagcaaagctttcttcggaaattatagtgaagcaaaaggttgggcagcatccccatataaatgtaacggacaatgacgatatggaacagtgggatgcggtaattatgggaaacgatgaactattagagaaatatatgtcagggaaaccgtttaaaatgtcagaactggaacaggaagaaaacaggagattccaaaacggaacgttatttcccgtttatcacggaagcgctaaaaacaatctggggattcggcagcttatagaagtgattgccagtaaattttattcatcaacgcctgaaggtcaatctgaattatgcgggcaggtttttaagattgaatattcagagaaaaggcggcgttttgtttatgtgcgtatatatagcggaacattgcatttgagggatgttattagaatatctgaaaaagagaaaataaaaatcacagagatgtgtgttccgacaaacggtgaattatatccatccgatacagcctgctctggtgatattgtaattttaccaaatgatgttttgcagctaaacagtattttggggaacgaaatgctgttgccgcagagaaaatttattgaaaatcctctccctatgctccaaacaacgattgcagtaaagaaacctgaacagcgggaaatattgcttggggcacttacagaaatttcagatggcgaccctcttttaaaatattatgtggatactacaacgcatgagattatactttcttttttggggaatgtgcagatggaagtcatttgtgccatccttgaggaaaaatatcatgtggaggcagaaataaaagagcctactgttatatatatggaaagaccgcttagaaaagcagaatataccatccacatagaagtcccgccaaatcctttctgggcttctgtcgggttgtccatagagccgctccctattggaagcggagtgcagtatgaaagcagagtttcacttggatatttaaatcaatcgttccaaaatgcggttatggagggggttctttatggctgcgagcaggggctgtatggatggaaagtgacagactgtaaaatctgttttgaatatggattgtattatagtcctgtaagtacccccgcagactttcggctgctttcccctatcgtattggagcaggctttaaaaaaagcagggacagaactattagagccatatctccactttgaaatttatgcaccgcaggaatatctctcacgggcgtatcatgatgctccaaggtattgtgcagatattgtaagtactcagataaagaatgacgaggtcattctgaaaggagaaatccctgctagatgtattcaagaatacaggaacgatttaacttatttcacaaatgggcagggagtctgcttgacagagttaaaaggataccagccagctattggtaaatttatttgccaaccccgccgcccgaatagccgtatagataaggttcggcatatgttccacaagttagcttaacagcttgcaaaagtcatataaaatgagatttgaaaggagaatgtaacttcatgtttgctaaaaattcaaaggcatattctgtctacctgctgttccgatttgtctgttccctggcggtttctatgtccacagtgctttccatcgtgtaccacatggaggtggtgcagctggatgctttccagcttgtcctggtagggacggttcaggagacctcctgctttctgttcgagatgcccaccggtgtggtggcggatttgtatagccgtcggcgctcggtgctgattggaatgttcctctacggcctgggctttctgatggagggtgcgctaccgtggttcgcgccggttctgctggcccaggttgtctggggttgcggtgataccttcatcaccggcgctctggaggcgtggattgcctcggaggaagaggacaaacccatagacaaggtgttcctgcggggcagtcaaatggggcaaatcggcggcgttctgggcgtggtgctgggcacactgctgggaaacataaacctgcaaatgcctatcatcttggggggcagtttgtgcttgttgttggggctggtgatggttcgcatcatgccagaaaccaacttctcccctgctattgaggaacggcagggcttgcttaaagactttgtctgcctgttcaagctcaacctgggctttgtgaaaggcgcacctgtgttgctggcgctcttagcaatcacactatgcgggggacttgccagtgaaggctttgaccggctctccaccgctcattttctggatgacacggtaatacccgttatcgggccgctgaacagcgtcacttggttcggtgttatcagtcttatcggcagaggcttaggtattctggcttctcagttgctcatcgcccgcatggagaaaaaagggactgtcagccgaaccagtgtggtcatgtccaccagcgccgggtatatcctgtgcctggttctcttcgcggtggggcggagcttttggttcatgttgttggtgttcctgctggcggggcttatgcgcaccatcaaggagcctgtgctggccgcctggatgaacgaccaagtggatgagaaaatgcgcgccacagtcttttccaccagcggacagctggactctttcgggcagatcatcggcgggcctattgtggggctggtagcccagcaggtgtccataccctgggggctggtctgtaccgctttcctgctgttgcccgcgctgttcttagtgccggtggcgggaaagaagcgggattgatatggcatagttaagtttactgacgagcgggagattacttccgctcgtcttcatttagtagcgcaaaatttgaggactctttatttccttattcggtatagcggaggcggctgtcaattcgacataattttcttgtgatactttaccgtacatgagcatttgcgcccggattgtcattgccgtagccctccatcagattgattacgccccagataccaagcccggctccaagtgctacaacaagggtctgcaaaacgtctactgcgctattgaaaaatgccataaatatatcctttctgccgcgtctgcggctgtccggcaagcggacaaaaggcggtcagcgtatggtcgccgccgcacaaaaaaaccgccctctggtaaaggcggctgtccccgcgctgcgtaagttctgcggcgcggcggtattcagttgtaaggggtgcggctcctgccgctgtgtactgcgccggaaagtgggggcgcgtatcatgtagccggtatggatagatgtgattgcttcaatcgctcctttctgtgttccgctgtgctgccggacgtttttttcagacttgcgggaagtgaatagcttgcgtagcaaggtgttcgcttcccgcaagttcacaaaggggtagctgccgcaaggcagcgtaggggaagtgtagcttcccctgtcccccggcggtctgccatgctgtcactgttgcgggataagcccccggcgcgtgacatactccgttgcaaaacggcggtgttccgcttccttttcccgccaatactcccataatgcagcgtcggcggcttccgcaacattcattaaaaaccgttcaagctgcttttgtttttcctctgcgctacgtttcctcatggtctgcgtcctcctgtaagtctgccgcgtcaagctcgtaatagtcaaaaacctcgtcgggcttgacaatggcggggcggcgtttaaggtgcttttccatgtcaaaggcgttcttcgggtctgcgtcggacaggtacttgtatttcgggtgcttcgttatgtcgaatttgtccgaaaagaacgggcgcaccccgcgtagctgcaagatacatttccctccgtccatgactgcaatttcatcttccgtcataagctgctttcctaatttctgatagttcagcccatgcgaaagctcccgcccccttgtttcggacgtgttaaagctgtctatcgtttcttttcctaaaatttccgatatttctttaagggtggttttctccttgccgcccaagaaaagcgtggtgtcgcagttgccgactatggtatcggcgttgtctttgtaaatggcttttagctgtgactggctctgcaagatgattgacgcggatatttcccggctccgtatcgttgcaatgagcttttcaaactttggtatctgcccgatattcgcaaattcatcaagtaagcacctaacatggacgggaagccgcccgccgtattcatcatctgccttgtcacaaagcaagttgaatagctgtgtgtaaaggattgaaacgacaaagttaaaagtgtcgtcggtgtcgctgatgatgacgaaaagggcggtctttctgtcgcctatggtgtcaagctccatttcgtcggtttccataagctcccgcagctccttaatgtcgaatggggctaacctcgcgccgcatgagataagtatgctttttgcggtcttgccagtaacaaaatgtcaatagttttttaatcacttttttcaaaaaggcaaaaaaaatagaacgtatagattatttccatacgctctatctcacatttcatattaaattttgaatgctacaagctgtaattctcttcctttcttattcccaattgttttcttgtaatactaaatgaagtaagtgagaataattagccattgtatcttttgcacggtttccatattcgttttctataaaagacaaatcatccttatcggaatgcataatcaatccatgattttctgtttctactggtaaaccattgagccaattatttgcttcaaaataaatataaggaattcctatatcactaaatggagcatggtcacttctcttttgccctgttggatatggataatcaacatttccttttggtgttaattgcattggtaaatttgccttttttgcaatttcaaatgccttgtttacagcttctacatctttaacaacacctttatcatttatgcgtcctccatacaaataaagattatctcctgcaagaatactatctatatttatcattagcacaatattgtctttttctttctttgtaagagaattaacatattcttttgaaccatgcattcctgtctcttctgcaccaaaaaatacatatttaatcgtatatggtgtttcgacatctatcattcgcaatgcactttctaatgcaacagctacacctgagccgttatcatctacgccatgtgttcctgcactatcataatgagctccaacaataatagtttttttcgattgcccttctttgattacttcaatattttgacttgattggctatcttcaccaccatcaaaaatattttctccagatgtgtccatcataggaacaccttcctcaatatcaaaagaatttaattttatatccttttctgaatatccaccatttaacaaaatagcagatataaacgaagccatttccttttccttttctgtacccgcaattcgtcctggcaagttctcttgaatatattttaaaaatgcgtatgattgtattccatagttttcttgcttgaaactctctgatatttcttgtgtaagagtaaaatcttttgcatttttcattattattgctgtatgcttatcaccacatcctgataacaaagaacatacaataacgatagataaaataataatgcatatttttttcttcatagtatttcgattaaacctcctttataatttcagatttgttactcacatgatatcatattttttcttcatttacatccacctaattttaataaactgccattcggcttgcttctgtaaccagcatccggttaatcttctcctgcattgtttcctttgcatcttcattgaaatgataacggacaacatagactgtctgcccgattttctttgtaaatgtgttcccctctgtttttgtattcatcattttttccataatcattttttcctttctttcctgtgcccgacagagagaggattgtctttgtccctgccggaagtttatctgtacactgacaacataagtgtcaacatggggtttgaaactttttactggttgtttttttattttccaaaatactactggaaagttttttgaatgttcttgttgacacctgtaaaaaaagctgaaacgccagtaaatataagggttttaggtgtcaacaaatctgtcaacaagcgataaatttacagaagatttgtagccttccgatatcaaaatcagcctttctctctgtcgggcaggtcaaatggcagctccaactgttctgccttcgtcagcttcgtaaatccgtctttgtccggttcgttgccaccctcttctgttccttccctgacccagcttctctgtctgccatatccttcctttgaaaatctgtggattccatccctcttccagccggtgatctgtgtatccataatggaacagatctcatttgtctcgaattttttcggctcccgttcaaaatggtcaaaggcttctttccaaatctggacggagcatacatgagttcccttgtaggcatctagccagtcctgaatcattcctgccatcgtatcttcctgtgtgaactgtttccggtattcactgatcttctgttccatttcttttgagaatttcaacagactgctcttattctccgttgaccagtagatttccattgcttctgcccatagctggtcaaaataggctctggcttctttttcatcatcaaggatatgcttctctgccttgctgctgtctatggcaatcggcaggaaccgtcttgccccggtacggtcaaagggaataaactgccttgtgttcgttgacccggcaaagatacactgacgcttccgatcttcctcatatttatcatagggattccggtaagtgtctttctgcctggtcaggaatgatttgatctcttcattgcttttcgcgctgattgctgcaatcatctctgacatttccatgatccagtgtccccggagatgctcatatatcttactgtcgttcaactgtttcaggtcatcagaaaaccagtcatcattcagtgcaaggaaacggaagaatgtggatttcccggctccctgctgacctaccaaacagagcatttcatctgccttacaacccggacggtagattctgctcaacgcttccatcaggaaatgtttcacaacctcatagacaaaatccgaagcatcagctcccatataccgttgcagtacataacggattcgctcctgtccgtcccattccagttgttccagatactcacagattgggtggtatgcccggctgttggcttctatgcggagtgccttatccatacatttttcacttgtgagcttgtaataccgttcaaagaaataataaaaataagtcctgccatcatcgtccagtttgcagatttcctcattccaccagagttttttcacaatatcaatcctgcctgtcagcttgttgtacttcatgctctcacgcacaagcggatcatttctcagcacgaccatataatttcctaccgttgctttcgcagttcccttttgtgtatattccagcatctgtttcacttcatcgactttacttttatctgccatccggagcatttctttcatggcatctttctgttcttttgtagcaatctcctttatcttctctttcgcattgctcaatcttctccatctccttccatttttctttgacaaggacttccttatctgccctatccccgaagagcaaaatatccagataatactcaacaaccgtcagttcactgagagaaatcataaacttttcattccattcttctgtccatgtttttggtgcatactgctctttccattccagaagcaggctacggtaattcagatatgctctcaggcatcttagatattttttctgccagagttcttccggtgtcggcttcggcttttttattggaacacgtctcttgttctgcagtgattccctgtccttgccggaataaagaatcctaaaatcatctgccagcttcatagcagcatctttcagtccaatgccaaacagttgtgctgtaaaatcaatcgcatctcccgtacagccacacccgaagcagtaatacctccggtcaactttcatactgggtgatttgtcattatgaaaaatacaacggatcagtccgctcctgttgggcttcaatccatacaattcaacagcctgccggacagtcacgttctgttttacttcatcaaataatcccaattcatttcctcgctttcttataactgcttcccaaatccgggaatcactttttactcaaaaacaaaaaggcactttgtcctgtccttacggaatcaacaaaatgcccttatagttccagatcactagaacacgattttcctttattcagttgttttctctctgcctcttctctttgaatctttgctacattctgtgcaagtctttccctgatagatggcttcacttcttttttgatttcttctacaacagcttttttcttctctggctgttttaactgtttagtaatccgtatgaccactttttccattgcagtttctatttttcttatcagcccgtccagtctttttattgcataatccttttctcttttggaagccttgtgtttcggatcctgaatccactttttagaatcttctgccaaacggatatcatctcttctggtagccagcattgcttcttttgctactttctccactgccttgtcataagcttcactggatacttcatcaagcaaggtttccacatcttcaatacggacggtaagctgtttcagttcctctctctgttcttcaattagatcaccctgcttgaatatacggtctgaattatttgcaaattctgtatcctgctgttttattttttcttcctgtgactgaataatttcttcatttgcacgcacataccttgactgttttgcaagctccagacgattctcgttcaccttatcaatctgcataagaattgtttcctgttgattcgcaatttcttctttctgcttcatacggatataatcttgtttttccaaatactttcttccaccatacgatggttcttcatcaagttccagtccgtgacgtttacagatatctaaaaacattgtccggcaggcagaatcaaaaacaaccttgcggttatttgtctttgatctcttcttttctggatctggaagttcaaatccaagttcttccaatgctgtttcctgtttcggctcaatttctccatatcggtttgtagcatcgaaaacatgacgctcatgaatatgaggtgttgcttcgtccatgtgtagcgaccaatcaataatatgcacgttagagccaaaccgcttatcgaactctttcttaaactcgtcaaatactaaaatcagggtttccacagaagcatgttcatctattgtgccaagctgatagatactttcttccggacaggtctttttgtttttccaaacatcttccacttctttgcatctgtctgggtgtctggctttcacatgtctctcattttgcttcataacgtaatttccataatgctcttcatagaatgccagctcaatttgttcaaaagaaaaattattctcttttccctgatcttccattgtggtatatccctgatagcaatcccagtaaatattttgccggactctttcattgtcgatatgctcactgtgttccggattaaatctccgatcattatgaagcggattgtaaactccatttttcccagatctgccattatgccttgttcctttcatttcacatttctcctttctttcaagttgtttccccgaagggattgcagcgaagctgcttaaaggctctgtcgccgttacagatagtacccagtaccatatggcgaaacgccatatcactgggcaatggctgccgcccttaacctgctaagggcttcgccccttaaccccagcaaggtgttgccaccctttgcattcctggcacaaaggacttccagccctctgtactcccggcagacaaaacgaaactcctgccgctgtcccttcggcatgttttccattctgcctgtttttcaaaaatcctctatttcggattttgtgaaattaaaaaagccgatgcgacttcaacttatgcaaaagtccaaaatacatcggctcaatcctttgacttgattggtcattattcatttttttctgactagctcatacagtccatttttaataatgagcaaaacaaaaggcactaacttttttacggttaatgccctttgggttaatcattattatattctataatttctatcccgtcttctacatttccaatttacaaatcaaatatagtttcttgtaaggtttccgacctttcaagtcctctgctgtatcatacatagtgctgttggctacgtccgttccgtcaaggactgccctacggcgtatcagcttcgccttgttccttgacctcactgcatttctctcaactttttagaaactatgaaattacaaagaaatgctaccgctacaataataaagcaaatgattgtacaccatacaggtactctcatatctaattgcactcgtaacaaaatcgtgattgctaaaaatacagctcccacaatttgtataaagtctaatatctttttttgaagtgtctgtaaatgctttttatcttttattctttcagatttccatattccataatttacttgcatatcatttacatcttcatctgatataagttcgtccatacttacatctagttctaatgccagtttttttgccgtgatcaaatctggacatcttgaaccattttcccaacgacaaactgtctgccttgaaacatataacttatctgccagttgttgctgagtgagatttttttcttctctgaattttttgatgttatcatttaatgccatactccatacctctctttcattcacatcatataacgatagaacccaaaataaaagtaccagtatgtatttcctttgtttccattttggtaacatctgtttattccaagttttccaccagttgtacgattgtcaggcttatacgcactggcaataacaggatccttataatgagttttacaactaccatgactgtccacccctttactgtttcagataactgcgatagctgtctatcacagaatctgtaacaccgtttttgtacactttacggatatcaacaacattttcatctttcaatgctttcagccaatccagcaagtcttttctgctatttacaaaattacagcatcttccgtctgcatattcaatccggtatctcataagcccctcctatacatacaccaattcatttaaaataatttcatctacccggcttctcacattgtttgcccggcggacccattccatttgatttctgcttttcaattcttccgtaatgccttcctgtttcataatctgattcatgagaaaatctctgcgttctacacactgctcatttaagtctgcaaggtaagtccaaagctttccggtcaatgtcagataggaatataagccacttttgtagtctttcagatagtttctgtgaaggcttccaaaaaagccaatatcacgcttttcttccggtacagcgatcagtggcagatagatttccccgacaaggatataatccagaccattgctgtcatcgtgaatgattctttctaattcgctcatgctgatgcaactcctttcttcggttctgcaggtggaagcagtgataccggaacaaacacaccttttgcaatatcttcctgacggatttcctctttttttgcatccatctcagctttcttttttgcctttgtccgttcatagtattcttgctgcttgccatttgctttccttttcaagtaattctgatgaagcctgtcttttctggcttcccgcttcttcatttcttcaatttcttctggtgtcatttccacctcaccgaaatgtggtggtaaatatttcccaatgaagttaaaatagatttccacttcctgcgttgtctcaatgcttccttttcggtcacgctcatgaacaataatcttttctacaaattcattcagcatgtaagtggtcaattcctcaaaattttggtatttatcaaccagagcaataaacttctccgctgatctgcgaccttcttcatagcctgataattcagcttccatatctgcaatttctgccgacaaatctttctgttctttagaatactgtccgtcaagaatcgcatagcgttcatctggcagcttgccaagaatattgtcctcataaattctgcagatcagtttttccagttcctgcacacgtttttttgcttctgccaatctgcttttcaatcttgtgatctcactggactgctgtgaagtctgtgccttttttactgtttccaaaaattcttcacggttcagctgtgaatactctgcaacagcctttaacagttccttaatcagctccataaccacatctgcattaattctgtgctgtgtctggcagagtgttccaaccggaactttagaatatgcagaacaggtatattgtggtactcgcttgccattatttactcgatgtacatacattttggaaccacagtctgcacaatacatcagacctgtcaaggggtgggcttctccccatccatctgggtaccttctcacattgcttcgaattctctgcacattgtcaaaagtttcctgatctatgattgcttcctgcgtgttctcaaacaccgtccagttatcctcagatacataatggcttttcttatccttgaaatgttttctggtcttgaagttcactgtatgaccaagatactctcttttcttcagaatacctgcaacagtagaagagccccagccataaggatctttgatttcttctactctgcctttccataatccggcatctttctttgccatatgaaccgctggtatctcaaccttatcctctttcagtgccttggcaatctgatatggtccgtacccgtccattgtcatgtgaaagattctccgtacaactacagctgcttcttcatcaacaatccattcattcggatcatccttgtctttcagatacccatacggtgttgtacttgccacatgcttgccggattttcctttcgccttgaaagttgattttatctttttactggtatcccttgcataccattcattcatgatatttcggaatggagtaaaatcatcgtcctcccggaagctgtctacattctcgttgactgcaatcaggcggacattcttctgtcgcagcaattccatatattgtccgactttcaaataatctcttcccattcggctcatatctttaatcagaatcgttccgactttccccgactctacttctttcatcatggcaagaaagcccgggcgatcaaatcttgtaccggagataccatcatcagtaaaatgaacaagattggtaaatccatgttcttttgcatattgttccagcagtttcttctggtttgaaatactgttggattccccgtttaattcatcatcacgactaagacgttcatacaacgctgtcatgaatccctgtttctctgtcatagtcagatgtcctccttcctttgtttattaattgcctgttctcatcccatatccgttcctgtaccgggttctgatgtttccgggacgtattaaccataaaagacacgctgaatgcctattcagttctggtatcactacgggcaggctgtttcgttttcaaggttcgtgtaagaagtaaaaaagatttttacactaaacgaaatgctcagaggtctttttacagcccccttactgcatcttttttgatttcgtgtcatctttttaaagttccttacacaatctctgtactgacgaaacaaaatacggacatgttttgaaattgttttttacaaaatacaattttgttctttaaggtaaaaaaataagcctcaagagactttttaatcattttggagctccaactctttaaatttgattgattaagaagtctcttcaaacttactacacccgccgcaagtttgtattttttgtactgcttgactgcaaaatgttccgggtctttttcttccagacgttcaaacatgaggtcaaccgggttctggaaatcctcgtcgtcctcgcgggcttccgacgcatttatcatctcaagcagcgtcgtgaagttcttctcgtcctccggggcttcataccagatgtagccgattagcgcggtgtagtagagcttttccgctttcacccagaaatcctcgccggatttttccccgtcgcctttggtgttggcgataatggtattgactaacttcaaaatgtccttttcgctccgcagataggcaaagggattgtatttcatggattttttgaagttaatcgtatttagcactttgatacggtatttgtaccgctgtaacattttcccggtttccaaaatcagtgttcctttcgggtcagtgacgatatacgacgttggaaaatcctttgacgtacattgcatgagcgacggtttcacaaagaaccgggtcttgccgctgccggaaccgccgattacaaggatatttttgtttcttgcgtatttcggctgcttcgggcggctgttcatggtgagccgttccgtctgcgttaaggggatattgttctcaaataccgggtcggtgtacggctttatgtcgtcagccccgccccaacgcgccgaaccgtattctgtcccgcggcggtatttcttcgcgttcttgcctttggtgtagataatcagccggacaatgaccgcccccgcaatgcctaaagctaagtctgccgggtggaagctcggcgcgatactggaaaaggcggcggtaaaaccgtccccaagatgtagcagctttgcgcttgcgtccgcgccgggggagagccggacagccgcgcccactttatcaaagagccagacaaagagcagatacgggagatttaggataagcagcttcttgatttccggcttcatagcgatacctccctgtccttgttcttgacctttgcccgttccgcgtttctgccctgtgcagcttctttgagggtagagagcagctttcggattgagggctttttctcctgtgtcagcttttttgcggaaaattccttaaaggctgcggtcagtacgtccgcgtcccgccccttgaagaaaaccagatagcggggcgggctttccgtcgcgtcctttttcagcgcaaagtcgataccgtactttttcgccgtactctcaaaggctttgatattgccctcggtaatctcaatgttggaaacgcccgcgttctgcttcataagctgctttaagctctgcttgccctgtggcggttttgcaagctgctttttgccctttgacagtatggctttcattgccttttggagcgtctgcgcggtcagcttcccggtcttgatgtaaagggctatggtcttttcgtttacttcgtcctgcaatttgtcgcgtcctcctttcgcgtttctttatggggcggcggtcagatacgcacccgcagcccgttcaagtcctcggctctgatacccacaagataccagttgtcgccgtactcaatccgggtcggcttccacttgccccgcacgaatacgtcaaagcactcgccgcaatgcaagcccccgtagtagctgtttaagtcaaagcggatgtcgtaacggtcggtgcgctcgtcaaataccaatgctcctgtcattttctgtgccataataaaatcctccttttgtggttgtgggtggttacaggctttcgccctcattgcatgaataatagtccgggtcgccgtactgcggctttttcggtgacagtgcgccgcttgccatgtcatgggcgacaagggaagtgtagtagttgccgattgtggacggggcgttgaaaagggcggctttcagatattgcttgatgttgcggattttggttgtgttctcccgcatacagtcaagcacaaagcggatatgctcgccgtctagtttcataaactttgacttcacaagctctgccgggtagtcgtcccccgcaatccgtacccgctttctggcggtgcatacggtttcaagcatgaggtctacaatctcgtccagcctgtcactgtcaaacttcatgtcctgtttgagaatgtggtagtcgatattgtccttgatgatttcccggtatatatcaactgcgctctgtgctgccgcttccgttcctttccgttccggcggcgcagccgcttctctgcaaggagaggggttaggggaaaggataggaatggaatgggtacttgataaatctgtatttgatttttctttttttggtaagtcagttctttgtatatctttatttaattgcgttggattttccaacgtaggtttttccaatgttggtttttcctgcattggattatccaatgttggattttccaatgtaggtaaatccggcgtaggcggctgcggctgctcgaatatcacatagtccgcgccccgcaagcgtcctttctcgtcgcgctcccttgaacggacgatatacccggcgcgttcaagttccttaatggcttcgcggatagcgtctatcttctcccggttgataagggataagcctttcaaggtgtagtcccaatcttcggggagtgacagcatttgcgacaacagcccctttgcctttagggaaagctccttgttgcgtaggtggtggttgctcattacggtatagcccttgtttcgttccactctgaaaactgccatagttcatagctcctttgctttggatttgttacgcagtagaagcgcggtttcgggggataaggtataaatccctttccgcgccagatacgcgcccggaaaaccgcttgtagcaaggctttttctgcccctactgcgtaacaaagggcatgaaaaaagcggcgttcctgttctcccatgtagagagtaagaaacgccgcttctgcgtcgtattcagtttttagtacaataccctgcttgtccgtcgctcgaaaaaccttgattttccagtgttttcaaaagtatcgttatctaacgtcagctttccaaagaccaagtttccagaatatgataaaagacattgaaagcggtctgataaactgcgtgattacgaaagatttatcccgtctagggagaaactatcttgattgtgggttatatctggaagttttcttcccagagcataacgtgaggtatatagcggtcaatgacggcgtagataccttgaataaatctgctatggacatcacgcctttccgcaacattttaaacgaaatgtatgccgctgacatatctgttaagataaaatcggcatatcgggcgaggtttcaacaggggaaattcatgggaactaccgccccttatggctatatcaaagaccctgccgaccacaaccatctgctgatagatgataaagtggcacatgttgtaaaagagatattcgaccttgcattaaaagggaatggagttgccaaaatttgcagacatcttaataaacagcatatcctacgccctgccgcttatgcggcggagcgtggcgaaacaggctttgaacgtcattttgaggggaacgaggacaaacgctatatttggagtgggaacagcgtgaggagcattttaagaagcccgatatatgcgggaaatcttgtaggctacaaacggattgccgccaatatgaaaagcaagaaacgcccctctaagctgcccgaagaatgggaagtgatacccaatacccatgagggaatagtcacgcaggaggaatttgatattgtccaacagcttattacaagtcgtaggcttccacagaacaagggaggatttgtaaatatttttgcaggcgttatcaagtgtgtggactgcggatgtgctctgcgggcaatgaacgtacacaggaggaaacgcccagagattatcgactgtgtacagtattcatgtaataattatgcaagaaacggaagaagcgagtgtagtgcccacaatatagaagcaagggatttattcaatgccgttcttgccgacatcaactgttttgcggatatggcagtgaatgatgaaaaggcggtcagggccatagaaaagcggctcacggaaacagaccagagcagggcgaaagcattagagaaagaacgtaagaagctgaacaaacgccttgcggaactggacaggctgttttcctctctctacgaggataaggtcatggagcgtattaccgagcggaattttgagatgatgtcggggaaataccagaaagagcagcttgaaattgaagcaaggctgaaagaggtgacggaaactcttaatgaaagctacgagaaatcacggggaatccgtgacttcctcgcccttatccgaaattatcaaggcttaaaagaactggatgcaacagttataaacgcactcatagacaagatacttgtttcggagcgtgagaagatggcagacggaacagtgaagcaggaaatcaagatttactataaattcatcggctttgtcgatgaattacatatcatacctacaaaacggtgggcagcaatgcccgctaaaaattgtacggtgtgcggcgttgaatatgtcccgggctctggtgcatcaaggtattgtcctgcttgtgccaagaagatacggagggagaaatcaaacgagagcaaacgcaggagcagagaacagaaaaggatagcatgtatgaactgtccgcaaaaaatgaccgacttataatgaagaaggaggacaatcatatgttgaaaaaatctttaaagaaactcatcgcattaacacttgcaaccgtaacggtagcgactggtagcatcgcagtcagtgcatccactctgacacccaagaagtcccacagcgaagctcagattactgagtatgtggattacttcaacgatattacagacagatatgcattccgtccagacgggtatgtacctactggttcggatggtagttatcatagtggaatggcatataggtcatggcagatgacaacactgcttcagaacacctcaggcatcacatccgagcagaaagctgatatgaagaaagcagcagccacatggaaaaggtcttacttatccgagcgaatgctttacatgtaccagactaagtggtcaaataaaatgtattattaccttgatgatgacagaacatctaaaagttgggcatctaagtacaaagctaaagctaaaaaaacatatactgaggtaaatgcttttatatctaagaatgccaagcacaatccgaaacttgcaggtgaactgaagaagttcaacaaacagcgtcttaacatttataacaaagccattgacaactggttcttcaaaatgacaaagaagcagaaagctaagtatataagccctatctgtggaagtggaagaaaacctcaggcatctattatagaatatgtggacgctatgtttagtaagtcaaaaatgtcatcagacccttggtatagaacaatgtttggtgcaagttgtacaaaacacattgcagttgatgattatgctgacactaagttatatgttctcaagacacttaaaattcatggttatgacttaaatccaaacggggcaggtaacgtatgggttgaccatactcagtggcagaagtggtaacccccaccctaacagggacaggcgcaagcctgtcctttctttttgcgttcacaacccctacaagtcagcccactctccttgggacattccaaatgtacaggtagaagtaaacaccctacctatgattcaatttatccaagggtacttcgcactaaaatagtagtaaaggtaaaaaaggaaaggagttgtcaagaaatgaaggcaaggtcattaagggcactattactggcttccagtttaatattaagtgtgggtacgacagccatgccaattatggcggtggacatagcacccgacacatcggattctggaatcagtatagatgcagatgatgggggtaatgatctattcattacagggagcaatactattaaacctgttggttgaatggggtattgatgatagatataatatataattcaagtcatatttcagggtagagatgccctgtatttttttgctgtagatacagtttcatatcttagtctacaacatgagtggggtactgcatcaagtatctacagttcacttctttccctttatcaggggtactttctcatctatccagtagtttccctgcaactaccctaccatatattgttttttggtagatatctttcagccttccagtatttctgccagtatcctatctctctcctgcttttattttccatgatgatgagattctgtttcgggtacatcagtcgatactaaattaaataacaagtagcttagaaaaggtttttgaatttcaggaaaagcttggtttctctaggtgttatccagaaaagggtatgtgagttctgaaaagatgacgaatagagacacaggattcttggacattccattgacgattaaagatgacgaagacacagttcggaaaggagaaaatgatggtacttactctggttaagcagttggaaattgcatggactgcactgtctggcagtgatgacccagatgatgagatccgtatagcggcactggatgagttgatagcattactcttttcggaagtgtgggatggaaaaaagggagccgcctttgctgagacgtatttcgacatcccagataaggaaataagtcataagctgggtatttctctttccaccgtcagaagcaaccgtcagttggcatccagaaagctctctaagctggttggtagcgatattgtagaagtaatatgtaatgcccctgccaggcaggtaagggacagacttgtatttctgcaaatgttaagatcaccaccctcatgggtagtggttcccaactctgtatgggagatgaatggggtattgcaggataaaaatgcatctctcagaaagtcttttccattaaaagattgtaaagctgagattgcctttttacggcagtacacgctctcccatattgagaaatcactggaaggtttaagtaaagaaaaattatcgttcctactgcatcttatgggttcagaagatgtgacaagggacagggtacttttattttacttattgcatcacaggaaaggaggtgaataaaatgagccagcataagagacataaaaaagtatatgtggtatgcaacgtaaaacctgatttaagttatgacaacgaccatcgcatgtacgatgaggttgtcggtgtagatgaaatagtatctctacctgcaaggcttcagactggagataaagtaatcgtcggtgacatctttactacatttccaacctatgacttcatgctgacattcttagactttgcactgagaaacgggattacttttgaatccacacgccagcgttacttatgcttttcagcggcacgtccgttaccttataaggtgacccactacctgctggaaatgcaacagttaagaaaccagttatggaatatgcgtgcacggtttggtatacgcaatgatgattctgttcaggctgatagcttttacagaaaatgtgactggattgttggtcgtgtagtttcgatcacactgtctacagacggcattctgcgaagataatatttagtcatagcaacataatagcagttctgtcaggtagcttctgccgacagagctgctatttggctgtgcagggcattttcaggtgtccagtgtaaagttctgcgaatggggtattatcctgctcacagcggcagatacggggtatagtctggatgtcgctttttccgcaatatgcgaccaatggggtattcatgggcattcccagtgttcccaatataaactgcgacctttagagggtacgaaatgcgacaggagggattttatatgtcaaagaaaaccagagcgttaaataaagaagagtacagattaattatcgactgtatcaaaaaaggttttgatatgcctgggggtactgcagtcaaagcaaatcccagaatcgctatggcactacaatgcgaagcgttactgggacttcgtatcagtgatattctccgcttgaggttagatcagtttatagcagacggcagtaattatttcgtagaggttaaggaacagaaaacaggtaagactaagaagtgttttgttcccttggagttgtactgtaccatccgtcaatatgcagatgagtggggtatcggactgcatcaaccgttgtttgatattacccccagaagcgtacagcggcatctgggtaaggtgtgttcttatttaggtcttacccaagtttctacccacagtttccgaaaatactacgctactgatatttacaagaggtcaggaagtaatattgatcttgtgaggcaactgttaaaccattcagattgtaaaacaacacagcgatatattcgggtagatccgcaggaactgtccaaggctgttgctgaacactgtagagatgctttaaaaaatgatagctagttttcctgcaccgtagttatatcaaaaacattatcccttatatcaaaaagaatagcattcctctacagtgctattctttttttgcttagtatagtttttttctgatcctactgcctgtttgtaatcgtagtttgtttaaaacattctacttaataccttagatgctctatctcttatgtctttcaaaagagacaaaataattatgaaatgcgaggtagagcattatgagaaatattttgtcacagtcgttaattaatgaattagatgagttagatcagttgacttcatctgtacttcatggtaacttgcactacgatgaagtacttgaacagttaaacatgacaaaacgagaaaaaattttaaagcaacatccatatgcaatttattcaactgataacggtacagcatggcgtacttatttacctgctactgaggaacatggttatcgcaagccagtcagaagaaagaacaaagaagatgtagaaagtgctgtagtgaagttctacacagaactttggaagtcccagcgtgatgaagtattaacctttgaaaaagggtatgagacatggatcaggtataaaaatgataataccagtactaaagcaaaaaccattcaggaatacattaacgactggaaaagattctttgctgattctaagttatcaaaaatgccaatcagatccattacgcctgtcgacattgatgacttctatctagcagtcacaaaagatttacagtataccaaaaaggctgtatctaatgcacgaggtatattaaatggtatcatgaactattacgttaaaaggggtattattcctcagaatcctgccagagatatttctctcagagattacaaatttaagcctaggaataaccagaatacgaatgtatatcccgaagaggatgtccaaaagctattaaagtacttaaagtattctgtagaggatgatgcttatacccttgccattcaattatctttttatttgtacatacgaattggggaaacaaaggctcttaaatggtcagatgtagattggaaggaacagacaatatccttgaatagacagattactgctcaccgccctctcaacagtgatttaagccttggaagtcatacggaagtagaatatgagcagatgaaaggaaattgttcttctgggtacagaacagaaccattacttccagaagctatcagaatcttaaagaaagcacaggagattaatcctgacggtacatatatctttgagggaaagaatggacgctgtcttaccactgatacatttaacagacgtttgagaaagtattgtgacgagataggcatacaatattattcaagccacaagatacgtgcatataatgcttctataagctatgatggaacaaatttagcagaaatacaacgcctgatgggacatagttcttcagctacaacttttggatacatccgtaatgttcatcatgataaaataaaaattagccctagactaggactgcagggggatgaaaaattaaaatagctattttagtagctcagattgtaaaaattgtgttcaagtgtgttcaaaacctataagcaaaaaaataagagaaacgttgattttacaacgtttctctcacttaagatcatgccgcagaccggaatcgaaccggtacgggtatcactacccacgggattttaagtcccgggcgtctgccagttccgccactgcggcatatggaacctatagggctcgaacctatgaccctctgcttgtaaggcagatgctctcccagctgagctaagattccatactacttatgcaattacttcgtcagcaaatgctaacgacccagaagagactcgaactctcgaccttcgccgtgacagggcgacgctctaaccaactgagccactgggccaaaataatttaaaaaatggaccttcggggactcgaacccaggaccgaccggttatgagccggttgctctaaccaactgagctaaaggtccaaaaagccgatgatcggactcgaaccgataacctgctgattacaaatcagctgctctgccaattgagccacatcggcatgttgtaacagaatcaagcctcaaaaatcacatttccattatttaaatgactccaaggggatttgaacccctgttaccgccgtgaaagggcggtgtcttaaccgcttgaccatggagccaaaactccccctgttggactcgaaccaacgacactgcggttaacagccgcatgctctaccgactgagctaaggaggaataaaggtttttgcaccttcaaaactacatacatgttgacatttccttgagattcattcttcctgcgattcttggtcaagccctcacccgattagtaacagtcagctccatgtgttgccacacttccacctctgccctatctacctcgtcgtcttcaagggggtttacttctttcgaatgggatatctcatcttaaggggggcttcacgcttagatgccttcagcgtttatcccttccgggcttggctactcggccgtagacttggcagtctaaccgatgcaccagcggcccgtccatcccggtcctctcgtactaaggacagctcctctcagatatcctacgcccacgccggatagggaccgaactgtctcacgacgttctgaacccagctcgcgtaccgctttaatgggcgaacagcccaacccttgggacctactacagccccaggatgcgatgagccgacatcgaggtgccaaaccactccgtcgatgtgaactcttgggagtgataagcctgttatccccagggtagcttttatccgttgagcgatggcattcccacttaataccaccggatcactaagccctactttcgtacctgctccacccgtcggtgtcgcagtcaagctcccttctgcctttgcactcttcgaatggtttccgtccattctgagggaacctttgggcgcctccgataccctttcggaggcgaccgccccagtcaaactccccgtctggcattgtcccaccgccgggtcacggcggctggttagaaacccaatactgcaagggtggtatcccaacagcggctcctcagcaactggcgttactgattcacagcctcccacctatcctgtacatgcaataccgagtcccagtaccagactggagtaaagctccatggggtctttccgtcctggcgcaggtaaccagcatcttcactggtacttcaatttcaccggatgcattgtcgagacagcgctcaaatcattacgcctttcgtgcgggtcggaacttacccgacaaggaatttcgctaccttaggaccgttatagttacggccgccgtttactggggcttaaattcaaagcttcgcgttaccgctaacctctcctcttaaccttccagcaccgggcaggcgtcagcccatatacctcacctttcggtttcgcatagacctgtgtttttgctaaacagttgcttgagcctattctctgcggcctggtttcccaggcaccccttatccctaagttacggggccattttgccgagttccttgacaatgcttcttccgccggccttaggattctctcctcatccacctgtgtcggtttacggtacgggtacggtataaacaatagcggcttttcttgacgcatggctcacggacttcgctactttatttcgctccgcatcacggcttcccattgccacccggatttgccaaagtggctggtaccccgcttgcaccgggctttccattcccggcttccgctttccttacgtgtccccacagttctgtcataccgcagtacaggaatctccacctgttgtccatcggctacgactctcgtcctcgccttaggccccgacttacccagagcagatcagctttactctggaaaccttggatattcggccataaggattctcaccttattctcgctactcattccggcattctctcttccatgcagtccacagctcctttcggtactgcttcttcccgcatgcaatgctcctctaccaacctttcggttccttagtttcggtggcgcgtttcagccccggacattttcggcgcaggacctctcgaccagtgagctattacgcactctttgaatggatggctgcttctgagccaacatcctggttgtcttcgaaatcccacatccttttccacttaacgcgcacttggggaccttaactgaaggtctgggctctttcccttttgaccgcccaacttatctcgtgcagtctgactcccgataatcgattacgcggcattcggagtttgatattcttcggtaggctttgacgccccctaggaaattcagtgctctacctccgcaaatctgtatcgaggctagccctaaagctatttcgaggagaaccagctatctccgggttcgattggaatttctcccctatccacacctcatccccacccttttcaacggatgtgggttcggtcctccactacctcttacggcagcttcaacctggacatggatagatcacccggtttcgggtctactcctactgacttaaggccctattaagacttggtttccctacggctccacacctgaagtgcttaaccttgccagtaagcgtaactcgccggaccgttctacaaaaagtacgcggtcgcacatataaagtgcttccacagcttgtagacacagggtttcaggttctctttcactcccctcccggggtccttttcacctttccttcacagtactatgcgctatcggtcactaagtagtatttagccttagggggtggtccccctgatttcccacaaggttccacgtgtctcgtggtactctggatcctgctcagtctcatcagctttcacgtacggggctttcaccctctccggccggctttcccaaaaccgttctgttagcttcaaagaatcttaaatgcagtccgtaaccccggaatgcacgcattccggtttaggctcctccgcgttcgctcgccgctacttacggaatcgagttttctttcttttcctccgggtacttagatgtttcagttccccgggttcccttcctacagttatgtattggctgtaggatacatgaggtttgctcatgtgggtttccccattcagacatctccggatcacgggatatttgctcctccccgaagcttatcgcagcttatcacgtctttcatcggctcttagtgccaaggcatccgccctgtgcccttattgcttgacctttcgcttcatcaccctagcgtaggtgatgcggtcgtttgattctcattgtttttgataactttgttatcgatgtcttcctatcttgcgttttatgagatactctcatatctcttaacgttttgtatcaaggatatttgattaacttttaatcaaatttcatgtatgcagttttcaaggtacaatttatatcaggcttaacacttaacctcacggctaaatttttataagccaatgggcttaagtggactcgaaccaccgacctcacgcttatcaggcgtgcgctctaaccagctgagctataagcccatcttgaaatctttcgatttcagtggagatgaagagattcgaactctcgaccccctgcttgcaaggcaggtgctctcccaactgagctacatccccatttgatctggcagccacctgctctcccacaccgtctccagtgcagtaccatcggccgcttaggtcttaaccgtcgtgttcgggatgggaacgggtgtgtcccctaagcgcatcactaccagaaatgttgttattcagttttccttgataactcaacagtaaaacacattctactctacttcttcttccttagaaaggaggtgatccagccgcaccttccgatacggctaccttgttacgacttcaccccagtcatcggtcccgccttcggcagctccttctttgcagttaggtcactgacttcgggcgttactgactcccatggtgtgacgggcggtgtgtacaagacccgggaacgtattcaccgcggcattctgatccgcgattactagcgattccagcttcgtgtagtcgggttgcagactacagtccgaactgggacgttatttttgggatttgctccatctcacgatctcgcttccctttgtttacgccattgtagcacgtgtgtagcccaaatcataaggggcatgatgatttgacgtcatccccgccttcctccaggttatccctggcagtctccccagagtgcccaccttaaatgctggctactgaggataggggttgcgctcgttgcgggacttaacccaacatctcacgacacgagctgacgacaaccatgcaccacctgtcacctctgctccgaagagaaggtccgattaaggaccggtcagagggatgtcaagatttggtaaggttcttcgcgttgcttcgaattaaaccacatgctccaccgcttgtgcgggtccccgtcaattcctttgagtttcattcttgcgaacgtactccccaggtggaatacttactgcgtttgcgacggcaccgaatggctctgccacccgacacctagtattcatcgtttacggcgtggactaccagggtatctaatcctgtttgctccccacgctttcgagcctcaacgtcagttaccgtccagtaagccgccttcgccactggtgttcctcctaatatctacgcatttcaccgctacactaggaattccgcttacccctccggcactcaagtatgacagtttccaatgcagtccacaggttgagcccatgcctttcacatcagacttgccacaccgtctacgctccctttacacccagtaaatccggataacgcttgccccctacgtattaccgcggctgctggcacgtagttagccggggcttcttagtcaggtaccgtcactatcttccctgctgatagaagtttacataccgagatacttcttccttcacgcggcgtcgctgcatcagggtttcccccattgtgcaatattccccactgctgcctcccgtaggagtctgggccgtgtctcagtcccaatgtggccgttcaccctctcaggccggctatggatcgtcgccttggtgggccgttaccccaccaacaagctaatccaacgcgggtccatcttataccaccggagtttttcacactgagccatgcagctctgtgcgcttatgcggtattagcagccatttctgactgttatccccctgtataaggcaggttacccacgcgttactcacccgtccgccactagaaatagatcaaatccaccgaagtctcaatgaaatatttcccgttcgacttgcatgtgttaagcacgccgccagcgttcatcctgagccaggatcaaactctctgataaaatgtttgattcactcaagataacaactagctatctctcgttttactgtttttggtttttcaaaccgttcttaaaaatgtaaagaattttcgagaatcgtatgtgtttcactgtttagttatcaaggttgtctgtctttgcctctcggctgacagctcatttattatatcacttgctttttgctttgtcaagaacttttttattttattttttaagttctttttcatctgcatcagcaactctgatataatatcatgtcttcagtttcctgtcaacactttttttatatttttttcaactttattcaaccaaatctctgttgtctgtcaaaaaaaatccgcctcactcagaagcggatttatcatatcattattttctttttgcgtcaagtattattttacatttttttacatattttttacgccatctccgatatcgctataatatcctcatttttaacgccccaatatcagagtaaagatttaaaaatcgttcgcatttgcgcaggaagacattcggatccgatacctacggtccacagataccaaacctttttaatagaagatactcataaatatcctgatcaggatatctctgtcatatatgaaactcagaatgcaatctttcttaatgatctgaagggccgcctcaccagcctttgtattgcacacaatggtgagagccagaaagataatccatattactataaggaatttaactgcccccagcaacgctcctgctaccttgttcatgccatgcagcacaggtaatctcgtcacaagattcagcatccatgtgatactcctcaccataatcgtcgacatcagcagagaaatcaggaaagaaattccattcactgccattctcgccagatattgagcaatataatccgaaaatgtagttacagccaaatactggtaactgtcagaattattattctgaaccagtccattcctcagcagctccgggagattcatttcatttataaattcagtctggctttctccactgcctgtccatgtgctgtattcctctcctacaaactcccggcagctttcctgtactttttcataaattgatgtattttcccgaataaactcatttacataaggatttataaaccacacgatcgccatcgacagaaaaacacatacaagcgaaaccagttcttttatcagtccccgcctataacctctgacacatgcagccgccagaaaaagtatcgtaatgactccggcccacgttaaagccattttcatcctcctaactaagttttattatctctacaccgctgtccaataccagaagatatctgttcattccgattttgaagaaatctttgatcgttccatccacactgccaagatatttctgtactcccctgctgttcattacacacatctgggaactgttgtacatcagaatatttccaccgcttaatttaatcgtcgtatatggaatattgaagttttctttgaatttcaatttgccatctgtagtataaacttccattgtatactgtttgtctttactgtcattcttaaacacaagaccaatcatatcattatcataaaaagtactgacaatttctttatctacttttactgtttttacttccttcggaatctggcttccatgataaattgtaaatccattatctttaagtgctacagaccggttattatcaagatactggatctgcggaactaccacgccttcatacttatatccactgacaattctgtcatcctcgttctgtcctacatctccaaaattgtaaaatgccacataactggtcgtatcacttccatctacgaactgataggttaccatcatgatcactccgtcttcagatacagcaatatcaaggggatatcccggatcatctatcttcgtctgattttcagcaatcagacttccatctgtaccataaaaatcaatccatgtatcatctccgccatccaggattgccgcaacaagaccgcttttggatacttttgctttgacaatactgtaagaagtagttacactgcctgtttttccggatttatcataaatctccaaagttgttccatctttatccgcaatcaccgcacgagttccattgacatctgccacaggattctgcatctgataggtttcactccataatgtactcatcttatcagaaacaagcgaaactccgtccggactgtatcgaaggatatttccgtccatttcaacataatttgtagaaacaatatcctcctgctcacttgtctggactactttataagtatgatagcttctcttctctatgtaaaatcccacagccgttacagcagcagctatcgccaccactgtaataactgtctttttcactacacttcttttgtggcgggacaatctgcgctcataatcatctgcatattcctcttcagctctctcccgggctttcgcttttctgtttctctctgcctgaagctttttctttttatgtttttttattattttcttaaatgtatttgccattttagcctttaccttatttctcactttcattttgttgattatcaggtttcagtttttgccatttattatagcacagttttctaaggtaatacaattacttgtcccggataaatgatttcgtccgctgacatcccattcaatttgcagatctgacttatggcttcgatacttccgtatctgtccatacttatctgaaaaagagtatcgccgggctgaatcacatatgactcatgggcttttcccgctgcttcgctgttttccttctgcacagcttccctgacacgtttctgtgctttacgttcatctgcttcctgctggtagatttgttcggttttatctgctttttctgtctttacatccggaagctgttctgttttgtccgatttttgttctgtatctgtctgctctgctgatatttttttctctgaagtattgtttttcttttcagaattttctttttcactggtgctttgattattctcttcattattctttttattcttccctgcatcattttgtataatatctgttcggtattgtttatgctgcctgacagcttcattgttcgaagtcccgacaacaggagacggcgttatctcctcaacgatcactgaagaaaccgtcgcgctctccttttcgttctgttttacattctggtaacttctgtaaaaattaacacccactgtcagtactgcaattgccagacatgcagttaatccatatgaaaaaacagaaggagctgccggctccttcctggtttcctttttatctgcaattattttgcgaaaatctttcacagcctgatcttcatatttttcctgaggttccggctgaagttcttcatttttgtcgatcatatacgtctgcataccgggatttttttcataataaagataataccctcccagacgcaccatttcattgttttcataacggaagaaagcatcttccctttcctgaggttccataagcatcaggactttttctcctccaaaatgtttcatgtgtacttttgacatcacttccgatactttcaggagaagctgaggctgtgaaaagaaccatcccacaatctcctgatcttcgaagtactccttctgggcttcctgtatctgcttccattgattttccgaaaaatcgatatgatcaggtgctgcctccatctcctccgctataatagcacctttgataaacagataagctgtctgagaacgccatttaagatttcctgtaagaactgccactctggtttttgcttctcccagagagtcttccgttctggcaagtcttaccagaaatgtatacacatagtcctccatataaatcctgtaatcttcggctgccaggccgatctggcgtatatttctgggtaatccaaacggttcctcaccattttgtccttcctgagattcgtccttatagattacttctatcatctctcatcaccccttcgggtatcaggataacacagataaattgcagattttatcacattgtaagaggaatttaccagaatttggcgacagattttgcacagtgcatatttttatcccggtaaggatatgatgttatcagaagcctcttcgcagcttgttgttatgaagcaaagggactatagcaattaaaagatataatcaataatgtgctctcgaaatctttttgtgcaggtacaatagagactctgcgagtacataatacgatcagggaggttttatggtattttatgtggactcacagaaaagcagttctgctgaggaaatcgcttttcttttaaataaatgtattcttcaatatccgggcagatggtcggaactggtttttctgtgtatcggaagtgaccgcgtgacaggagactgtctcggtccctatatcggacaccagttacttgaacatctgaatacggacactcatggcgtttatgtttacggtaccctgaaaagccccgtacatgctttaaatctttccagaatttcccgccagatcaaaattctgcatcccgaaggtctggttattgcagtggatgcctctcttggacaaaaaaagcacctggggtatgtgaccatcgcagatggtgcactttacccaggtgctgcagttcagaaagaacttcctcctgttggtgatatccatatcacagggattgtaaacattgcaggtgtactggaacagctaacccttcagactacccgcctgtctacggtaatctctctggcagataccatcacacagggaatcgtaaattatacaaattctttgatctgtttgtagatgccttctgcatcaagaccatatttctcaagaagagctgtggcaggaccggattctccgaatacatcatttacaccgatacgttttacaggtacaggtgctttctcagacaggcattcgcatactgctccgccaagtccgccgattactgaatgctcttctacagttacaaccttgcctgtttctttggctgctgcaactacaagttcttcatccagaggcttaatcgtatggatattgattacttttgcatctacgccgtctgccgcaagcttctctgcagcttcaagagcaggagctacgcagagaccgtttgcaatgatcgtaaggtcttttccttcacgaaggacaatacctttacctaattcaaatttatagtccggtctgtcattgataaccggaactgccagacgtccaaatctcatatatacaggaccaacatgctcataagctgcttctaccatagcttttgcttcaatatcatcagaagggcaggcaacaaccattcccggaattactctcataagagcaaaatcctcacaacactgatgggtagcaccatcttcacctacagaaattccgccatgagtagcgccaatttttacattgatcttcggatatgcaatagagttacgaacctgctcaaaagcacgtcctgctgcaaacattgcaaatgtgctggcaaatggaacttttcctgtagtagccagacctgcggcaatgcccatcatattacactcggcaataccacagtcaatatgacgctccggaaattcttttttgaatacgccagtctgagtagctgcagcaaggtcagcgtccagaacgaccaggttctcatgtttcttacctaattcaaccagcgcagcaccgtagcttgctcttgttgcgatcttctttacttctgacataatgcttcacctgccttttctaactcttccattgcctgtgcatactgctcgtcattcggagcttttccatgccatccaacctgattttccataaaggaaacaccttttccttttacagttttcataatgatagctgtaggcattcccttagtagcttttgcttcatcaaaagcagctcttaactgatccatatcatttccgtctgcaacgttaatcacatggaagttaaatgcctcaaatttcttatcaatcgggtatggagaacatacttcatcaaccttaccgtcgatctgaagtccattattatccacgatcactacaagattgtccagttttctgaagcctgcaaacatagcagcttcccaaacctggccttcctgaatttcgccgtcgcctaataaggtgtatacacgatagctttcattgcttaatttggcagaaagcgccataccaactgctgcagagattccctgtcccagagaaccgctggacatatcaacacccgggatatgtttcatatccggatgtccctgtaaataggaacccagatgacgaagagtcttcagatcttcttttgggaaaaagcctctttctgcaagtgcagagtagtatcccggtgctgtgtggcctttggaaagtacgaaacggtcacgatcagccttcttaggatcctttggatcaatattcatttcttcaaaatataaataagtgaatacatctgctgcagacagagatccgcccggatgtcctgcttttgcagaatgtaatgcagtaacgatgtctttacggacttcgtttgcaattttctgaagttctaatttttccattgtggtaaattctccttattcgccgaatactgctttataatctttctggaatttctcaatacctgcatctgtcagaggatgttttgtcatctgtacgattacattgtacggaacagttgcaatgtcagcacctgcaagtgcacagtctgttacatggatcggatttcttacgcttgctgcgatgatttctgtctcgattcctgccacttcaaaaatctcagcgatctcgcggatcagatcaacacctcttgtagaaatgtcatccagtcttccaagaaacggagatacataagtagcacctgctcttgcagccagaagtgcctggttagcagtgaagatcagagtaacgtttgtcttgattccttctgcatgaagaaccttaactgctttcagaccttctactgtcataggaattttaacaatcatattcggatgaatggctgcaatctcacgtccctctttgatcattccttctgcatctgttgtagtagcttttacttcaccgctgatcggtccgtctacgatagatgtgatctctttgattacttccttgaaatctcttccttcttttgcgataagagacggatttgtggtaacaccacagattacacccatatcattagctgccttaatatcttctacttttgctgtgtcaataaaaaatttcatgttcttaaccctcctgatttttgcttgtcataatcgttcattgatctgatggtttcattataacagactttatattcaggtcaagcgccgcaaaatattattaataattttcttattaataatcatgtgttttattaattctttatttttctgtcacaacatacattccgcaactgatttcttttcctttttcgtaactgttcagtacttttgcagttacaggtaaaaatcctttacaaaccgtctctgatactggatttcagcctgcacatcccgggatttacagcaattccagaggatgccttcaaaattattattaataattttcattcgacgtatttaattattttttttggttctgatataccccgtagtgcgtctcgctatcagcttgggggtatattcaatattatagagactgacaggagcagaatctgtgagaaaacggtcctgctcatcgattttgcgcagtataatatcacaggcatctctgcctttaagggctacgaaatgatcgatcgtagtaagagagatcttccgtattcccgaataaaagatattatcgcacccaatcaccgatacatccttgggtacatgaatccttgcttcatggagagcatccagcgcaccaatagccatcatatcattctggcctgcaatagctgtaaattccctgccttcatccagaagctccatagtaagctcataacccatcgaatattccgaatccatccgtgggatctgcatatcgatagcttcatccgcagccttaatgatcacatgatccttcaggccttctttctcaaactctttcacaaaaccatttacacgttttgttctctgccattgtctccttgtcaggggcggagtgataaacgctacatctctgtgccccagatcaagcagatgtcttgccatcatccttcccacaactgtattatcctgattaatggcatctatagttgtagttttctctttattactgatgataaccagtgggattgtctgcgccagttcctctacctgctgctgaaaatccggatttggattacagcagtagataatgccaagcggctctattgtacccatcatgcgcagatacttctcctccagacggggatctctctgtgtattacagataaagacaccatatccctgcttgttcgccactgcttcaatcccctgcagaagcaatacataatacgggcttgtaagcgtagggcaaaaaacaacgatcagcttctctttccggctttcttttctgttctttcgtccgggaagatgatagcctaattctctggctgcctgctctaccttctcaactgtttctctggaaaaagaaacgttatatttcttattcaggaccatggaaacagttgcctgggagactcctgccctctttgccacgtcagaagaagttgctttctttttagacaaagtgatgcctccttttccgatgatcttttgtcagaacagtaaccttaaagctccacacgcccctcaagagcacgtaaaagagtcacttcgtcaatatattccagatctcctcctaccggaactccgcttgcaatcctgctgactttgatcccggtaggtttgatcagcttactgatatacattgccgttgtttccccctccagactggaattggtagcaataatcacttcctttacctcatcctttgccagacgctgcatgagttctttcagtttgatatcatccggcccgattccaagcattggagagattgcaccatgaagaacatgataaacgccatcaaacttgcctgttttttcataagctgcaagatctcttgtattctctaccaccatgatcactgaatgatcacgcttatcattgctgcagatgggacagatctctctgtctgtcagagtacagcagcacttgcaatactgtacattctctcttgcaccggtaatggaagaggtaagctgctctacctgatcctttggcatattcatgatgtgaaatgccagtctctgtgctgatttcgcaccgattcccggaagatgggaaagctgctcgatcagcttattgatatgactgctgtagtattccatcagaatggaagacctccgccaagtccgcccagaccacctgtcagtttagacataacagctgtagattcttcttccactttgcgaagtgcttcgtttgtagctgcaacgatgagatcttccagcatttcgatgtcatccggatctacaacttcctcctgaagctttacttttgtcacctctctcttaccggagatagttacctctacagctccgcctcctgcagtagccgtaaattctttctcttccagagctttctggttctcttccatctggcgctgcattttctgcgcctgtttcataagattattcatatttcccggcatacccattcccgggaatcctccacgttttgccatttgtgatgtcctccttgctatttattgccttattatttactgccttttcctgtccggagaatatttagttactgttgactccgttcacagtaacgtagccaaaattcattccagattgcctgcggcaatggaattttggcttgtatgtctcgggattttggcatattcatgccaaaacacctcgcgggatagtggtgtgtgaacagtaacaatatttattctcctttttcctcatcaggatcttcctctatcacaacatccatgtggatattattctttatcgcctggtccactgtgatatttgccagatttgtatgctgatgcttatctgccaccagcatctggatctctactgtttttcctgtctgggcagtgatgatgtcctgaagctctttcttcgcttccgaattgtccacataggactgccccagaaaatcctgaaattccacataaagaacaggttctcctgtctcactgttatacttcggaacagatttctgaagcatctgtttgaacatccctgttgtctgtcctgtgatcactctccagcctgccacgatcttctgcaaatcttccggtgccgctttcgccggtgctttgtttcccgccggctcctgaactgccccggtttcttccggcattttccctgaaccctgctgcacgatcacctgctgtaccggacgttcatccatccgctgttccagcacacgcagtctgtccagaacagagtccagattagtctccattgcaggacggcacagcttgatcagtgcaatctccacaaggacccttttctgggttgcatatcggatctggttggacaaatccgaaaaaatacggatataccgcatcagcgtctccacatccagcatggtgctctcttctttcagaagcttcatgttgtcggatgagacatcgatcgcttcctccggattctcagaagtcttaacgagaagaagatttctcatataccaggtaaaatctcccacaaactggctcagttccctgcctcctacgatcagttcctccaggatatgaatggaacctgtcacatctccccggatcacttttcgcaaaagcttgctaaacacttcggtgtcaacggctcccagaacctccagaactttatcataggtaagttcctgtccaagataaaaagcaatacactggtcgagaaggctgagcgcatctcgcatggaaccatctcccgctttcgctacatatcggactgctttttcctcagcttctacaccttcaactttgagcagttcatctagtctggccgcgataatgtctatggtgatcctgtggaaatcatatctctggcatctggataaaatcgtaatcggaatcttgtgcgcctctgtagttgccaggataaacataacataagacggtggttcctccagtgttttcagcagggcattgaaggcacctgtggaaagcatatgaacctcatcaataatatatactttatatttaccttctgtagggcggtaagaaacctcttctctgatctcacgtatattatccacaccattgttggatgcagcatcgatctcgatcacattcattgcagttcctgcctggatcgccttgcacatggcacattcattacaggggctgccatttacgggatgctcacagttgactgccttcgccagaattttggctactgttgttttaccggttcctctggtgccgcagaacagatacgcatggccgatacgattatgcttaatctgatttgtcagagtagtcactatgtgatcctgacctttgacatccgcgaaattatccggtctgaactttctgtaaagagcagtgtaactcatgagtaaactcctatcgtaactattcagcacccccactgtcagcagcgcaccaaatagttatctctatcttattatcacagccgccgcggaaaaaattcccgcggcggtcttttttacatccatatcttatatgaaaaagtatctgtcagtcaagtactgtttcacttaatcagtcaccaaagctgataccaatctgtttggcagcaactacaagctgatctttcggtgataccatcttaagcttacctgcacactcttcaagaggtacacgtttaattttgccgtttaccacgccgatcatgatgccatattcaccatccatgatcgcctgcgctgcacctgcaccgattcttgtggaaagaacgcggtcatacggacatggttctccgcctctctgtgtatgtcccggaactgtaacgcggacttcgcttccgatctctttgtagatctggtcagcaatctcataggaaacggacggatatttctttgctcgggcttccagtttctctttgtatttctttttaggaagttctgcgtcttctttggaaatcgcaccttctgcaactgcaaggattgtgaaacgcttgcctgctttggcacgtttctggatcgctgcggtaacttttttgatatcatatgggatctcaggaatcaggatgatatccgcaccgcctgcaacacctgcatgaagtgtcagacttcctaccttgtgtcccatgatctctacgataaatacacgtccatgtgaagatgctgtcgtatggatacagtcaatggcatttgtggcaatgtttaccgcactctggaaaccaaaggtcatgtctgtgccatagatgtcattatcaatagtctttggaagatggataatgttcagtccttcttctctcagaaggtttgctgtcttctgtgtaccatttccgccaaggatcacaaggcagtccaggcagagtttataataagtctgcttcattgcttcaaccttgtccaggccattctcatccggaacacgcatcagtttgaatggctgtctggatgttccgaggattgtgccgccctgtgtaaggattccggaaaaatctttggatgtaagcatacggtatttaccatagatcagtcctttatatccatcatcaaatccataaacttccagttcatccaaattgttgctcagtccctttactactcctcgcatggtagcgttaagagcctgacagtcaccgccactggtaagcatacctattcttttaatcatgatagtatcctccatttctgtgttttaagaattatccatatccatacatacaagacatgttgtgtactctggcatatccatttccagaataaagatagtttatttctgtttattatataatatttatcgttttcatacaatagtgttagaaaagttttagttactattcacgcactacgttcgttactgttcactccgttcgttactgttcactccgttcccagtaataagttttactataatgattcactattgacaaaacagcctcctgcctatataatcagaaatgcgcagccggggagatagcggtgccctgtacctgcaatccgctacagcaggggtgatgccaatccgaggcttgtatcctgtggagctgccctctataagtggcgttgacgtttgggtcttacgcaacaggaatctgtgaaccgtgtcaggacaggaatgtagcagcactaagcagaagctcttgtgtgccgtaagggtgcctgggctgagttaactgtagaggtaacgtctgtgggaccattccgaagtgcggcgcgcaaaaaagaatattcatgatgcaggtcatcatataaaaaagcattcagaattttatctgttgataattttctgaatgcttttcttatttttgtggtttacaaaagtccatatattaacagaagcaggaaagagacttatacaatttccatcagataaagaataattaatcctctactgcctgtacctgacttttgttcttatatttcttcattacatgaaaataataaggaatcagtggaatcagtgcggcgatccatgcggtcgggtcagccatacagacaccggcaaaggaagtatgtcccgcaatcaatacgacaattccggttctcgccaccagttcaaataccccgccaagcattggtacaagtccatatcccattccctgcagagtatttcgatagaggaaaatacttccgagaaacggatatgcccagaatactgtccggaaataagtaacagacacatttactacgtcctgttccgatggatctacgaaaagatatgtcagatattttccgaagaaaaacatcaggaacataacaaaaacgctccatcccaggatcatcatctgcgtgtaacggactccctgtttcacacgatccatttttcctgcgcccctgttctgacctacataggttgctatggttgcaccgaaggctgtaaatactgtggcaaaaatattctggatcttaccggcagcagagaatccggccatatgtacaggtccgtaaatattgaccgcgctctgtacaataatggttccgattgctgtaatcgaaaactgcagtcccataggaattccaagcttcagaagtctgccgaaactgtcccagcatatctcaaaatccttccgttccagatgaaggatcggaaatctttttacaatataaatcaggcagcacactgccgaaattccctgtgcgatcactgtggcatatccgcatccttctacacccattccaaaggctacaataaaaactacatccagaataacattgatcacagccgaaatgatcaggaaatacaatggcgacttggagtcacccagcgcacgcaggaaagccgcaagtgcattatatgcacctgtgataataagacctgcataaataattcccatatatgcagttacatcaccaaatacctcttccggcgaattcatcagatgcaggattggtttgttcgcaagactgaatcctatggtcatgacaatggaaaatgcagccataaggtaaatggacatggcaacataatggcgcatcctgtcaaactttttcgctccgaacatctgggccacgataatcgcaaatccactgctgagtccattcagccagccggtcacaaaaaacatcagtgaaccggtgcttccgatagctgcaagggcatttactccgataaattttccggcaacaatggaatctgcaatattataaaactgctgaaaaagatttcccaggcacattgggatcataaattttattatcagactcaccggactgccgacggtcatgtcgtttgttgtatcttttttcattctttttattcgcctctttttatttctgcctgtaacattaatcctgttacttctattacttttattactcctattgcctttaagattcttcctgtttttgtctgtcttttacttttattgttccggttctccctccggattttcctgtgcagatttaagggctgccttttcctgcttctttttctcacgaagctttctgaaaaactcagacaacatagaagaacattcctcttccagaactccctgtataatctttacctgatgattaaatccatccacctgcaaaagattcatcacagaacctgcgcagcccgctttggcattcatacagccgatcactacttcatctattctggactggacaagtgccccggagcacatctggcatggttccagcgtcacatacatagtgcatccctccagccgccagtctccaagttttttactggctttgcggattgcattcagttctgcatgggagagtgtatttttatctgtgtttcttctgttatatccacgtgcgatgatcttaccctcatgcacgatcacacaaccgattggcacttcttccagagcttctgccttcttcgcctgacggatagcttctttcataaaacgttcctgatctgtcaacttttcttttcctttctgctgttgcatcactaccagaatagcaaaaagaaagcctgaaaaccaattggtttcagacttcctatgcgtagtcgaagcgacgggattcgaacccacgacctctgcgtcccgaacgcagcgctctaccaaactgagccacgcttcgtcaatgcaagtgctattatattcataaaatcgcagtttgtcaatagattttttcaaatttttttaattttttcgaatattttcttctgatggtcatatacattattgaatctggttttacggaggaaggattttggctggatatcggcgttttatcgcatatgtatatgactatgaaagcggaaagaaaggcagcaattgcggatttattaaagttgaagtaaaagatcagcaatgttctgttgagattcatctgcattgtccggggctgcctgaaaatgtaaaatgcaatatttatggatttacacgaaaggatggcctgatcaacggaattcttctggatacctgcgagacagaaaaagaaactgtagaatgcctgatcataacagatgcaacagatatgaatgactccggcgttgcaatgggtaagttgggcggaatgatcattacttcagataccggcggattctttggtactgaatgggacgatcagcctatacgtccggagaatttccacgaaataaaagctatgcctgacgcagatattcctgaatctgcgaaaatcacttcacagaaacccgaagttccggcagatatggtattacaggaaatgcccgaagaacttgaagatatttcagaaaaacccgaagatacctcgcttacaaaagttcctgacgattctttatcaattgaaccgtctgccaacattccggctcagggaacatctgataacaagccaggaacagagtcatcctatatctcagataatactgttgaagattccaatagttctgaaaatgccggcaatcctgtcccggaaagaaatgcagaaaacagaaaaacctctgccgaattttcccccttctccgatggcgaactgatttctgcatggaagatacaccttgatgacctgaagcattttccgcggcattactgtgcactgcgcaataaccgttttctccagtatgggcattataatttcggatatttgcttttaggacaaagaaataacggacagtatatcctcggcgttcccggcgtttataatcagcaggaacgctttatggcaaatatgtttggctttccttacttcaaagaaagcagctatatagagattccaaaaatgcgcggcggttactggtatcgtttaatcgatgccccggattcccacagataaaagcgtcttttgaagaatcttctgaaaattctgaagttcttcaaaagtatagcttccatatccaggcctgaggactccatctgagtccttataagcctgcagataatattctttcgctcctgccagccacccagcgatttcttcaaaatccttctgcgtatgcagttcccgtactactgttgttctgaattcatagtccagattcccatgcagcagaaaatctgctgtctcaaaaatactgtccatatcaggcttttctattccggtcagatttccatagttatccggacaggctttgatatccatagctactttatcgatcagtccggcttctgccagatgttttacaatcttcggacgtgagccattggtgtccagtttaacagcatagcccagctctttgatttttcccagaaattcctccagaccatctgacagtgtaggttcccctcctgaaatgcagaccccgtccagaatcccctttctttttttcaaaaaagtcaaaagttcctcctgactgtaatccggctgttctccgggagccacaaccaatataccattctgacagaacggacagcggaaattgcatccacccagaaatatagtactggctacctttcccggatagtccagcaatgtcgttttattaaagccacagattctcattgtttatctccattccaattatattttaccgtatataaatctgatatatcattttatcatcaggcatctgaatcctcaagttaaaccacctatgttatagcaatccgggcaaaaatccgaaaaaaagaaccctgttttaccagagttcttaatcacattattgttttgttatcagttcaactgataaacctcagcagactgaagtccgaagcttaatgcttctgaatggctgtcacaataaatatcaacatgtccataaggtgttcccagatcctctactgtgtatacatttccgttgatcagaagctgtgttccaaagggtactcccgccatagctacagtacgtcctgctgtcggaactgttccgctggctgtcaggttacctgctgtaccgcagcactgtgcacagttgcaatatgcagtcagtgtaaagttgccaaggtattttccctgaccagaagaactgtctgaggatgcctggctgtcagatgtatcttctgattcattgctgtcagagtctccctcatagaaatctgcatcgttctcttcgtatgtatcttcatcatcagaatcccctgaatcttcagaagtatcctcagatccttcagtctccgaagaatcctgactgtccgaagagtcttcctcataggaatctgtatcttcttcataatcatcagaactctcttctgcatcctgttcctgtgccgctgccgcctctgcttcggcctgtgcctgcgctgcctctctggctgctttttcctcttctgcctgctgcacaagctgagcaatgctgttatctgcattgttgatttctgcagtcagtgctgctgcttcttcctggcttgcgctgatctggcttacataggaagatatgttatcacttgtgcttgctgcaagattctgaacctcctgctgtttggccgctctctcttcaagaagctgatcaatagcagccttctcttcctcagcagttgtttcctgatctttgatagtgttctgaaggttctcgcatttctccagcatagtcctgtcatactgggaaatcttcgcaacactctctgcattgttgaggaactcagaaagatccttagatgacagcaaagtctctaatgcagatgtaccgccattctcatacatatactggatgcggagcttcatatcatcatattgtttatttaatgccttcttggctttctttaattctgtgtgaagctgtttcagctcattctctttctctccggcctgtatgctgagttcagaaattgcattagtcaggtcttcatactgtgtattcaaatcagacagatagttctccagctcctgcttcttgctctgaaggctgtcaatattcgcctgtgtctgggcaagtccggcttctgcctgctgtttctgagcctgcatatcagcaatcgcatcttctgttgcatatgcagttgttcccatggaaaaagtaagcattccggccagcagtaatgaaaaaacttttttcttcataaattaatcacctttctcgttaatctgaaacccagtatatcatatttcgtaaaaaaatcaacactttttattaatttatgtaataattatgtaacattttatcttcactaatgctcagcaaaaacaggcactgcccctttttcagagacagtgcctgtgcttcttatctgtttacagttctttattcaccggttattccgcagctgcagcttcttccggttccgcatccataacttcctggaacttgtccagaatgatcgtctggatcctgtcacgtgttgcagaattgatcggatgtgcaatatcacgatattctccgtctgttgccttacggcttggcatagcgataaataaccctttttctccttcaatcaccttgatatcatgtactacaaattcatcatcgatcgttatggaaacaaccgctttcatctttccttcttttgctaccttcctcacacgcacgtcagtaatattcatgatacaaatttactcctttcgatttaccgaatctatccggctgttttatttacagtatatatctgtcatttttctccacgacgatcttcacttcaccgtcgccgcagtaatacgaatttgcacgaatagtatcccggctttcaacaatgcagttctcaatatgagtattatctcccagatatacattgtttaaaatcacagagttcttgatcacgcagttatttcctacaaatacgtctttaaaaagaacggaattctccaccgtaccattgataatacatccgctggcaaccaggctgttcttcacctgtgctcccggattgtattttgcaggaggcagatcatcaatctttgtcttaattgtcggttcctgtttgaagaaatagtttctgatctccggtttcaggaaatccatatttgtcttataatatgcttctgctgtggagatattgctccagtatgtgtcaatcttatatccatagattctcttaagattcttgtagcggatcagaatatcctttacaaaatcatgtctgccttccagcgcagctctctcgatcagctcgatcagctgtcttcttcggataacatagatacctgttgaaattgtattataagaagaaaccattggcttctcttcaaattcctcaatcctgcagtcctcattcatacggagaacaccaaatctctcaatctcactgggattatcgcaggtagtgcatactaccgtaacatctgcacgtttcgcaatatgatattcaagaaccttgttgtaatccatcttataaacgcagtcgccggatgcgatcactacatatggttcatgactgcttttaaggaattccagattctgataaatagcatctgctgttccctgataccacagactgttctcttttgtgatcgtaggtgtaaatacaaagagaccaccctgttttcttccgaaatcccaccatttggaagagcttaaatgttcattcagagaacgggcattgtactgtgtcagaacagcaactctctgaatatgagaactcgccatgttgctcagtgcgaagtcgatacttctgtagcttccggcaatcggcattgctgcgattgccctcttatttgataattctctcatgcggttattattaccgccagccaaaataatacctatcgctctcattattcgtcaccgtcctttgctgtaattacctgtccgccggccagctcaccatcaggataatcctcaggaacagttatacctgagattgctgtattctttccgatccttacattatccgggatcacgctgcgttcaccaaccgtagcaattccaaatgcataaactgcaggtttcagcacattcggtgcttcctcaccacatcccagtacaacattgtttccaatagtaacatcctcggcaataatagccttatccatctgtacgccctcaccaatggtagaattgcgcatgataatggaatcacggatcacgctgccttttccgatcacaacatttggtccgatcacagaattatgtatttccccgtaaatttctgcaccctcaccgatcagacatctgtctgtaaccgcatctgccgaaatatactgaggcgggataatatctccctttgtgtaaatcttccagaattcttcatagagattaaattccggaataatatcgatcagttccatattggcctcccaataagaacccagtgttcctacatccttccagtatccattgtattcgtaggcgaaaagtctttcacctttctccttgcagtatggaagaacatgtttgccaaaatcacagctgttctgatccttcagagacatcagtgcttcctttaaagcaggccagctgaaaatataaattcccatggacgccagattgctgcttggatgctccggtttctcctcaaactccgtaatgcgtcctatgtcatctgttaccatgataccaaaacggcttgcttcctcaataggtaccggcatacaggcaatcgtcacatccgctttattcgctttatggaaatcaagcattacttcataatccatcttatagatatggtcaccggataagatcaggacataatccggattatactgttccatgtaatccatattctggaagattgcattggctgttcctgtgtaccactcactgctggtactcttctcgtaaggcggcagtactgttacaccaccttcgtttctgtcaagatcccatggaataccaattccgatatgtgtattaagtcgcaatggctgatactgtgtcaatacacctactgtatcgatgcctgaattaatacagttacttaaaggaaaatctatgatacgatatttcccgccaaaagcaactgcaggtttcgctactttttctgtcagtacacccagtctgctgccctgaccgccggccagaagcatagctatcatttctttcttaatcatgcaatcacctcttgttgtagttatggtaactattcgtcagtctgctgtttcgcgaggcactgaacagttacaggttatgattatttaattataacacacttttatctgttagtgaacattatttacaatttttgtttctcattttttgtttttttatgatttttgcacacgttttttattgagtctgtatttccaccgatatattattaggcatttttcatatatccaatgtcgttttttgtaattttttatcaaccaaaagaagtccttttcattttaaggcacagggagtataataaacagacagataaaacagttccagtaactatgcgaatatgttacagttaccggatttataaagatttgtaaataattaatcaaggagaacatactatgtatcagatagattttcacaaaccacttcatatacattttatcggtatcggcggcatcagcatgagcggactggccgagattcttctcggcgaggattttgtcatttccggttccgattccaaatccagtcctcttacgcaggcactggagaaaaagggagccaccatctattacggacagcgtgccacaaacattaccgatgacgtagatgttgtggtatataccgcagctatccatcctgacaacccggaatttgcctgtgcaaaggaaaaaggacttccaatgctcacacgtgcagagcttctcggacagatcatgaggaattatgatactcctgttgccatttccggaactcatggaaaaacaaccacgacatctatggtatctcacattcttcttgcaggagactgtgacccgaccatcagtgtgggaggtattcttcctgctatcggcggaaacatccgcgtaggcaattctgagacttttgtcacagaagcctgcgaatacacaaacagctttctgagctttttcccgaagatcagtattatcctgaatatggatgcagaccatctggatttctttaaggatattgacgatatccgtcattccttccgccgctttgcagagcttcttcctgctgacggtacactgatcatcaatgcagatactccgaaatatgaagatatcatccgggatcttccatgtaatgtgatcacttatggtctggaacatgatgcagattatcaggcagcagatatcacttatgacaaatatggacatgcttccttctccgttctgcgcaatggcgttaaggttggcagctattatctgaaagtgccgggcatccacaatgtttccaatgcactggcagcaattgccctcggtcatcttcttggtctttccgaagaagtgatcatcaagggacttggaagtttcacaggaacagaccgccgtttccagtataaaggagaagttgcaggggttacgatcgtagacgattatgcacatcatcctacagaaattgaagcaactcttcatgccgcacacaattatccccataagaaattatggtgtgtattccagccacatacatatacccgtaccaaagctctgcttccggagtttgccaaagcactcagcctggcagatcatgtggtagttgcggatatttatgcagcaagagaaaccgatactctgggaatttcttctgaagatctgcagaagcgtattcaggaactgggaactccctgcgagtatttccctacctttgatgagattgagaattatctgctctccaactgccaggagggtgatctgctcatcaccatgggagccggagatgttgtaaatatcggggagcatctgctgggtaaataatgtttctgcctgacataaatatcagcaatttacacaggacaattcggaaaataatttttcagaattgtcctgttttttacaaacgcccaacttatagcaatagaagatactgaacacttgtgtctctgtcgacaatttccattaaaaagttataaacattttatccccctcaattcttcctttatttataacagttcagatcacttatccacattttccacatcgttatacacattttcatctgcctgcatatgtggatgtatatgtgcataaatcacttaacataattcgacattattcgtccccgtaatactccgtttttccctgaaattcaacatttttcaggtttccaataatatataccacatttcacctttccacattatccacattatccacattcaaatgtggatgaaatcttcgacaaaaatcccctattctcttttaaaaaatgttgtgctataattcatagatatcaagtcagaggaaaaatatctttttttactctgacatcttattattatgatatcagggtcaaaaagtcgttcgtgcttgcacgataagacttttgaacttggaacccgccaaacatgagaaagtagcgatttacgcagtaaatcagcggatttcgaatgtttgagaattgtgggagctgctttgcagcggagcaattcgtggatatcaggttaggggcaaaataccttttgaccctaacatcttattattatgaaagagagtggaaattcatggctatgatcactttacagaattcccgcaatgcggaagtaactgtattaaccaacaatttcatagacaactatatgcctggggccaatggagaatttgtgaaagtatatatctatcttctgaggcttctttctgacacctctgtacccttcagtctggagcagatggctgatcatttcttctgtacagaacgtgacattatccgcgctctgaaatactgggagaaagagaaactccttactttaacctacagaaataacgaagatatagcagatatcatattgaatgtaccacctgtaaaatctgctgcttccgacacaactgtttcggcagcccctgttacaaaaacagaaccccagacttcttctgcaccggcacagcctgtgaagcagaccaccaactcagccactgcactgtctcctgaccgtgtaaaagaattaaagcaaaatgatgagatcgtacagctcctctatatcgcagaacagtatctcggcaaaacgctcactcctaccgagatgaaaaagatcctgtttttctatgatgagctgaaattctcgcctgatctgatcgagtacctgatcgaatacagtgtcagccgcgggcataagagtatgcgttacatagaaaccgttgctcttgcctgggcagatgagggaatcaccactgtcaccatggcaaaagaggcaaattcccgttatgccaaagaatactttactatttttaaatcaatgggaatcagcggacgaaatccggtagatacagagatttctcttatgaacacttggctgaatgattatggttttaccatggatatcatccaggaagcctgcagccgtacagttctctctaccggacagccaagtttccagtatgcagataaaatcctttccggatggaaagataaaaatgtccgtacacttgcagatgtccggctcctcgatgctcagcatcagcgccagaagatggaaaagaatacccagcgaaaagcagcttccaaaccggctgcatcaaaccggtttaacaatttccatcagcgacagtacgactttaacgaatatgaaaagaaattgctgaatcagtaacggcagtggcataatcgtctgaaagtcactgaacagctacaaaaaaacaaacgaaagggtgtgaagtcatgcctttacagaattatcagtatgatacgatcatgcgggaatacagcaagacccagtctcagaacagacgtattctggaggagcgtactcaggagatttataaaaaaatcccgcgcatccacgaaatagatgaagaggttgccaccttaagcgccaaaaaagcaagagcactcttaagcggagaatcatcaggtcttgaggaccttaaagctgcaatctctcttctgtcccaggagcgcaatgccctgctggtatgtaactcatatccggaggattatctggaacttccatataagtgtccggtctgtcaggataccggttacgtcggaagccaaaaatgtacctgttttaagaaagcagagatagaactgctctatacgcagtccaatttaaaagaaattctcaaaaaagaaaactttgaccacttttcttttgattattattctgatacaatgaagaatgaagctaccggactgacagaaagagagacggcccggagagcttatgatattgccagaggttttgtgagaaattttgacagttcctttgagaatctgtttctttacggtgataccggtgtgggtaagacttttctttctcactgtattgctcatgatcttctggaatcagcacattgcgttatgtacttttccgcatttgatctgtttgaactgctggcagactccaaattctccagagataaaacagaaggacaggaatttgtatttgacagcgatctgctgatcatcgacgacctgggaactgaacttacaaacagctttgtctcttcccagttgtttttgtgcataaatgaacgcatcatgcgcaggaagtctacgatcatatcaacaaatctgaaactggaaaatttctcggatacttattccgaacgaaccttttcgagaatcgccagcaactaccgtatggtgaagctggaaggaaaggatatccgtatacagaaaatttttttaggaggaaaataaaacatggcacaggcaacaactaaagatttaactacacttccggtgggcagacttggtctgatccccctgatcagctgtaaggatctgggtgaaaaagtaaatgaatggctgatacagtggcgtaaagagcgcagccacgaagagcttgattcttttgcatttgagggttatcagagagagtcctatctgataccggtccagacagcacgtttcggttccggtgaggcgaaatgtacgatcatggaatctgtacgtggtgacgatatctatctgatggttgatgtatgtaactacagtcttacctacagcatcggaccatacgagaatcttatgtctcctgatgaccattttcaggatctgaaacgtgtgatcggcgcaatcggcggcaaagcccgcagagtaaacgtgatcatgccttatctgtacgaaagccgccagaatatccgcagcggcagagaatccctggactgtgcaacagcacttcaggagcttgtaagtatgggtgtggaaaacatcatcacttttgacgcacatgacgcgcgcgtgcagaatgcaacacctctgcatggatttgagactatacagccatcctatcagtttatcaaagctcttctcaatcatgagaaaggacttcacatcgacaacgatcatttcatgatcatcagccctgatgagggaagcatgaaccgcgcaatctatcttgccaatatccttggtgttgatatgggtatgtattacaaacgtctggattactccaagagaatcaatggacgtcacccaatcgcagcttacgaattcctcggtccaaaccttaagggcaaagatatgatcctgatcgatgatatgatttcttccggtgatacagttcttaagatttcttctctcctcaaggaaagaggagcaggcagaatttatatctgctctactttcggactgtttacaaacggactcgagaaatttgatgaggctcataaggcaggagtgtttgacaaactgctcactacaaacctgatctatcagtctcctgagcttcttgcaaaagattactatatctcctgtgatatgagtaaatatattgccctgatcattgatactcttaatcatgatcagtctgtaagctatctgctcaacccggttgacaggatcaaccgctgcgtaagcaattacatggctcagtatgatgagaaataaataacttctgtaaaatttataaaaagagatttcatgttctgttccggctgtttcatccgaaattcctgcagtacatgaaatctctctttttgttatatataatgcaatccactcttctatgcggccctacactgaataactgcttcgcagtctggttaaaaattcaggaaataatttgcttcccataagggattccctctctgtccagaagttccatctcgcgtttactgcaggtactgatgataacctgctttttctccttatacatccatccaagaactgcctcaagatcttcttcctcatacatcccaaagatatcatccagtatcaccggcagactttcttcctgacacagaagctctcctgcagccatgcgcatggcaaaataaatcagctccagagtgccgcggctgagacattccagtgcttccactccgttcccggtagttactgtcatatgggatgccgcatccatctgtacgtcctgatattcaccatctgtaatctcactcaaaatctgagaagttcgtatctgcagctttcgtcccacctgaagatgaatatttcctgacattctctctatggtttccatcgccatattcagagcctgtacctcccgctcttccgatgtaagcagaaaagaattttcttcgtattcccggtattcttccttaaggttacaaagttctgtttctttctcatcatagtcctgtctgagattttctttactgcatctgagtttctcctgcctggatacccagcgtttcttcatccgtattctcttctgaaattcccttgcatacttcagctgctgttttccacaaaatcccaccaacgcagctgcaataaccgctacgatcagacttaccgaaacactgtccgctataatcgcagtcagaatcaatccaaagatgccggcagcggccgatatcagcattcccattgcaaagctgtttctttttgcctttgcctgtgccattctctcatccagaataaccgcaccattttcatctccgggatgcatccgtaacgactcctctttctcattaatctgatccagctttccattcagattattcagatcacttatgatatcatccatcctggtcagaagtttctgcctctcctgttctgtctctttctgttttctgtctgcctggaccagataaccctttctggacatcttgagcatctgcatggcccgtcccagatccatggagctgtctgcagttccctgatagccggtcataaatttttgcagctcccgagccagatcctgttctgtcggactctttaacttcgcagcaaaaactgtattatcgtagattgcttcactgatatctccgagaaacatatttttaatatacgtatgtactatcgctctttcgctttcattctctccatacagaacattaattcccggagaaaactctaaagttttatcatggatttctccagagtttttaatatttaactgtctgataatcatattctgtctatcacctgcttgtttccagtaaagcctgaagaccataatataatgccttctcctccactgcatttctgtctttttcaagaaaataactgatatagtcaccgatcagtgttccactatattttttttgaagtgcttccagatcataggaaggctttgattcatccagaacctctgttacgtagccaaaagacttcagtctctcgggaagcagcagaagctccggtgccctggttccctggatcacgatcctgtagatattcatgcgtcctttattcgccagatccgccttcagcatatcttccagagatgcctgtgtagaatcttcacgcagcatcagaagaatctgctcataggaacggcaggcaaaaggaacaaaatttgtcttaagccttccgttttccagatgtccttctatgtatccatgatcacccagatcatttctgtcaacaggctccaacgcacctgcataagctacattatcccggatcagaatctggggtttatgaatatgtcctaatgcaatataatcaaatcctgacgcagcaattgatttgatattcatggggatatgcttcgcatctccaccatgagccagtaaaatgtgaaccccctctccctctgcaggatgtatagaatcatacagaggattctctatttcctgatgttcatagctcagtccatatacataaacatccagtttctcatctttcacacaggtaagctgttcattcttaaaaaatgtcacattcttttcccactgaaaatcccggtaaaaagaatcagccttaatatagtcatgatttcctgccatcagataaacccgggtatccgggatggtggaaaacaggttatttacttctttcagttcccgtagaagaggctggcggtggaacaaatctcctgctataaataacaaatccaccggattctcgcggatacccgcaataacccggcggaaagtttcccagatttcttcctcccgcctgctgctccatggacagcccctgtcaggaactgcaccaaggtgtacatctgcaagatgaataaatctcatgccaatctctctttctataacatttttgatatctgcggattgccctgcagcttcaatgctcccacaatactgatatcagtcaaattataaatcacagtttttaacagttcttgggaatggaattacgtcgcggatgttgcccatgccggtaaggtacattacgcaacgttcaaatccaagaccaaatcctgaatggcgtgtggaaccatatttacgaagatcaagatagaagtcataatcctctttcttaagtcccagctcgtccatacgtttctcaagtttctcaatgtcatcctctctctggcttccaccgatgatctcaccgattccaggcaccagacagtccatagctgcaacagtcttgttatcctcattcatcttcatgtagaaagctttgatctctttcggataatctgttacaaatacaggtttcttaaagatttcttctgtaagataacgttcatgctctgtctgcagatcgcatccccagaatactttgtagtcaaatttatcgttgttcttctccagaagctctactgcttctgtgtaagtaacatgaccaaactcagaattgatcacatggttcagtctgtccagaagtcccttatcaacaaaagaattgaagaaattcatctcttccggtgcattctccaatacataacggatcacatatttcagcattgcctctgcaagatccatgttgtcatttaaatctgcaaatgcgcattccggctcgatcatccagaactctgccgcatggcgggttgtgttggaattctcagcgcggaaggttggtccgaaagtataaacattgcggaatgcctgtgcaaaagtctcgcagtttaactgtccgcttactgtcagattagtttcttttccgaagaaatcctgagagtaatctacagcacccttgtcatctgtcggaacgttgttcatatccagagtagttacctggaacatctcacctgcaccttcacagtcgcttcctgtgatcagcggagtatgcacataaacaaatccctgctcctggaagaaacggtgaatcgcataggcacacagagaacgtacacgaaatactgcctggaatgtgtttgttctcggacggagatgtgtgatggttcttaagtattcaagactgtggcgtttcttctgaagcggataatcaggtgcagaattaccctctactgtaacttctgctgcctggatctcaaatggctgttttgcctgtggcgtagctaccagtgtacctttgacgataatagcagcacctacgtttaatttgctgatctcagcaaagttctccattgtatcatgataaactacctgcagagtctcaaagaaggttccgtcatgaagcacgataaatccaaaagtcttggaatcacgtacgcttcgtacccatcctcctactgtaacctctttgtccagatatttctctctctctttgtaaatctcttttactgttgttaacttcatatctatgtttcctctttctcctcatcgttctggatgttacacataaaaagacgaaacgctgttctcgtctgacagccgtctcgtcttttagtatagactattccctgatttcacgcaaggagtaatctggtatttactgtgttttttattcgttaccgggtacgaaacgaatagtaacttttatcctgataatatttaaataacatctatcctatcttggtaccctcagcgaatctatacacttggcataaattcgcttgtatgtttttgccgtataatgcagaccatcatcgatagttcctgctccatagtgatcactggcaaagctgtagcctgtggatttcaggtaggagtacatatcgatataagtatatgcagaagaaagatttgctttcatataatcgttaaaggatctgactgccgcttcgcttcggtctgctcgtcctgtatttgaaagcatcgtacggttcaacggatttactgacatgaaatacagttcgcatcctttacttttaagctgcggtgcaatccagttataatattctacataatctgcataatctgacagatcatttactccaaagttaaaaattaccgctgttttcttagaaagaatactgttggtgtccttctgcaccatagcataaagctgtgaccatcctgtggtagtaagccaatttaatttctttcccgcagagcagacaaacttcacatttttaattgctgattctcccattcccttcagaacattctccataaattctgtacgggaatcgcccacaaagattacctgtttgtatttatagatatctacctgcgggagctcagcttctgtaagatctttttctgttgatctgttaaatactactgcatacaggttcatattaccgtttactgtaatcttctcttctgcctcatattccggattcacagactgcattggttttgatgaccatcccatgaaagtataaccttctgcatctcttactcctggcagagaataggtagatcctttcgccagagtcgttttctgccaggtgctaccgtcacatctgtgaaaagtcagctgtactgccttcttctgtaccgcataaagagtgatattcttgttgactgtacatttcgcctttgctgttgctttctcagaatttttcttacttgaccatccctggttaacataaccggttcttgccggtacttttgcaaaggtaacaaccgttccctcttctactgtctgagtaagtttttgataagccgcattagtgcttccatttcccagatagtagctgaccgtataataattactctttctgcgcactgcatagaaccgagttgcctttgtaatctttactgtatcaccggctgaatattccggttctgtttctcccttttcagttgtccagcccagatttgtatagccctttactttcggcacatcaggcagtgtcactttctggttttttgacgcatacatggtgagcgaagtataaattttgctggtacttgttccattattgttattgaaagtaactgtgtaaggcaatttcttatatacagcatagagagtcagtgtttttgatacagtcacattctggcctgctttatagtcagctttagaggcttttttactctttgaccatcccagagactgatatcctgtcttgacaggcacctgcggcattgtaactgtaagtccttttccgactttctgattcagtctggtaaatttactgttgcttgcccccgtattggtcttaaaattcacctgaagtgctgtacggcgcacaatgtaaaaatctgtgtcaccggtcactgtaaattctgaattcagttcatattttacagcagaacttccctttgtatctgtccatccataattaatgtatttagatgatggcatatccggaagtatgacgttttttgtctcatatgcatgcagaattccattggaaaacacactggttcctgaattattataaagggaaaccgtacatttctttggcatatagaagttcaggatgcctttttcgagaaacagattccagctctcgcctttcttcagagtaagaatatctccacccttcagagtgatcgcatctccaagtttttcatttttttccagtttccacatatccggtgcacctgtatccggtacattgggaaggatcaaagattcaccccaggacatcactgttcgcagctgttcacattcatttccttctccgtctataaaccggagcattacctctttctccggattaatcgtcggcgtgggagatggtgatggtgtgactgaaggagtcggtgttgaagacggcatcggtgtgaccgaaggagtcggtgttgaagacggcatcggtgtaccctccggtgtcgaagtcactgttggtgttggtgacagttccgatgccattactttctccgaatcagaagctgccggcaaagtattttctgtatcagttatgcacgaatcttcttcccctgaactgaaaatctcttcaaaactgtccggagtgccgaactctgctgcctgtacgggaactgttgcagtgatcagtgccacagtcagaaacacacttgccagacgctttcctcttttgtgtctttttctgtacatatttacctccattttgcaaaaacgtcccaacataaaatatgcgggacgttctctatgcattcccaatcattcaaaaacatcttcagactgcccggcttttgatcagaaccgtcacaacctgctcatatgtaaataataccagatttgtcatcctgctatgtaaacactgttttcttatggttgaaaatattccttataatttattgataaacctcataaatgcttctctgccttcagcagtacatttatatacgccggcatcctcaagtacatgaacgaatacattaccgacttcttttctgagaacatcctgaatgttgtctttatcaaggttgtcatatttcggaaggaattctgcaacccacgctgcatgtttctcaatcttctcattggaagaaatgtcttttccctccagaatatattctgccagaagttccagttcttcttttaatcttgccggaagtacggcaagtcccattacttcgatcagaccaatattctctttcttgatatggtgatactctgcatgcggatggtatacaccaagaggatgctcatcagtagtaatgttatttctaagtgtgagatccagttcaaacatatctccggatctgcgggcgatcggtgtgatcgtattgtgcggttctccatcagtttcagcaaagataaacgcactttcgtctgtataacctctccacgcttccagaacatgtgtagcaagctctatcagtctcttctcatccttatgacggatccttaaaactgaaagaggccatttaacaatacctgcttctacatcctcatatcccggaatagtcacatgtttctcgatcggtgcttttgccattgcgaaagtataatgtccgccctggaaatgatcgtgacttaaaatagaaccgcctacgataggcaggtctgcattggatcccaggaagtaatgcgggaaaagttttacaaaatcaaaaagtttgataaatgtattcttctcaatcttcatcggaacatgctgactgttaaagacgatgcaatgctcattgtaatacacatatggggaatactgaaatccccagggactgtcatttacagtgataggaatgattctgtgattctctctggcaggatgattaactcttcctgcatatccttcgttctccgggcaaagaagacatttcggataactgctggattttacaagcttggcagcagcgattgccttcggatctttttccggtttggaaagattgatggtgatatcgattttaccatattcactgtctactgtccatttctgatctttctttacacgataacgacgaatataatcgctgtcctgactgagtttatagaagtaatcggttgcttcctgtggatctttctcatatctgctccagaactcattctgtacctgtgccggacgcggcatcagacagttcataagtctggtatcaaaaaggtctctgtacacaacactgtcttctatgagatttctcttcacagcctcatccagaagtgcatttaatacctcttcaagatcgatatccctgtactcttcctcaggttccacatattcgtcttctttaaagacatccagaagaagatttattgtataattcttctcgcaggccggtgtaagtcctgtttctactccgtactgtactaattttttaatgttctcatataacatctgtacgttcctccgtttcgctgttactgtttcactcttacagtaacgtgtttaaacaataaatttctctgccactgtttgtcctttttagaatactcaaatatcagcgaaatgtaaagaagcatttttacaattttttggatgaataaccggcaggttgctgtcgcgttactgttcgctccgttctcagctgcctgccggttatgtttttcatcagtaatttactgtttctatataggtgataaacacatttccggctttctggaaaagatccgtactgtcattcattccatacggataggtctcttttttaaccggatcatacagccaggtattatattcatcatatcctacgatcactacgcttgtatctgctcccgttttggcaattaccggacgctgtgcacttatctcgtacagcacactgtccagactgcagccggaaagatcgatcacagttccggtctttttgaggctctttttcagggttttaatatcataggttccctgaagcacactctccggaatcccttctgtatctatctgcatttttgtctttttatttccacgttcccatacatactgctgtgtacggttcagcactacacctcccagcgtatctgcacgcaatacagccttcgccggatctgtatagataccgtccagtccgccctgtccgtaaacataatatgctgtttcctgaggaatctgagtgtccagaacaatgtctttccgatcggaactgcttacctttgcatacatagtcagcggagaatctgtctgtttggttgtgttaaataccagtttcacacgaacacctgtcctggatgcagaaataagttcgatttttactgtatttgccgctgcctttttattattcatgatcgtatctttcttctgggcaacataagaggtttctccggattttgcagaaagttcaaactcgatcagagtatttcctactgaaatatcagtgatataaagtccgtctttccggtattctttttttacatttccttcaaaatcttcaatgcgcagaatgcggatcccaacagatttatgtccctcctcatctgtaagaatatcttctttattcagcattccataaatcagatcttcattcataaatccaactgtacgaagtctctggcctttctgcggtgcgatcagtcgggttttacaggtatcaaaatcaatttccttgatatttcccttttcatccccctctgaaaccagccaggctgcatggtcattattatcggaagatacaaaattcgcattttttattcctttttcaagaatttcactggagttctcttcgatattgatcctgtaaagattcttcgccagaatcagaaacagctcattcttttcattgacataggacagtttttcaagatcttttttcagaaattcaaatgattccgaaacagggataaaggctctttcttctgccacgtttttatcacgattgtaatggtaaactgcaattccttcatatccttcatggcttcctctgttcatatatccataaagtacgaaatcaatatctccttcatcagttactctgacgatcttgatgtcatgctgagttctggaatcacggaaatctccgtccttcaattttctgaaactgaaaacctgatttaccttttcattgcccggtgaataggaccacagatctccctcctgcacaaaagctatcacagtagcagcatcattcatcatatattctacattcttatcgcgcactccaaggataatcccatcatcctcataaacaggcagtgtaccatcaaagacctgatttgcagaacgctggaaatccagcagataaatcctggtatcctgatatttcattctgtaaaattcttttacgtcatataattccgtttcctcatcatcattctgcgaagtcagctgatattccagcacaacgctggcagttgtctcattgatctctttgatcacaggaattccctcctgacacagctgcggagcaagattcccccaactgatctcactcagggaagaattaatattaattcccgagtaattcgttgctgctcctgttgtctgtggttccagataacttcccagtgcatctgctgactctttgtcaagacacgcttcataaaaatattttacaaaagctgcataatctgatgcatgtacctgtgacctggaaacaactctcgtataataatatgctgtaccctcatccagttccagggcaatctgcatggaatattcctgattcatacgcagatcactgccaatctccacgtctacggacaaatactgatcttcttttacaagattcttaatcttcttattttcaaggactttacttccatcagatgtacggatctcataagaaaaactctttacttccgaatcatagggattcactttaaatgtcagtttttttgatgtatccagaggagtcacactgtctctgctaaaatccgcctgcataggctgcgcatatccatacatccggtttatcagcgtatcattcatatccaccatgacttccggaaacactgcgtcattaaaatcagaacggttatctgtggattcactgttaagaagcaatgcagtacctgctgtaccaagcagaaataccagaagaagaatacctgcttttttcagtatccttttcatcgcacactcccttcctgttctttttcattcagaagcctgtccagtgtgggatggatattcagggctgcaagcattttctccaccttaccctggtctgatcttttccctgttctgactgctctgatcaggagattcttaggtgtatgttccatatcaataaactccaggatctgggtatcataacctttgctctccagaagatctgcacgcacagcatctgtgatcagcgcagacatcctttctttcaggattccatagcgcagaaccggctccagcatttcatttttgatctgtttattaacttcatgctgacagcagggtacggaaagaatgacttcagctccccattccactgccttggcaagtgcataatcggtagctgtgtcacaggcatgaagcgttaccaccatatccacacaggatacaccttcataatctgcaatatcaccatgatagaaatgcagcttctcatatccgtatctgagtgccagagaattacatttctcaattacatctgttttcaggtcaagacctatgatatttacatcatatccttttagttctcttaaataataatacatggcaaaggtaagataactctttccacagccaaaatccagaatcgttatttctctgtctctggaaagtctgggaagtatatcttcaataaattcaaggaaacgattgatctgtctgaatttgtcatatctggcatggataatctttccctgttcattcataactcccagatcgatcaaaaacggaaccggaacaccttctttaagaatatattgtttcacccggttatgtgcctggatctgaactttttctttctgttcatggtgtttctgtttaatagtcattttcccctttttactgacaagaacaaccccgtctgttactgcaccctgtgcctgaaactgtctgaaattctctgcaagttctttttccacatattcaatcagttccgtacgcccgtagtttttatgcagaactttctgtccttctgtggcagatgcctgataacagatctgtcctttcagccggatcggacgaatctttatttttgatatgccatctttatttctgccggcactcagaacagcctgtatcagattttcatttatctgttcttctaaatattctcttaaatttttcattgctctttctgtctgttaatgttatataatctgttgtaactgtccggtgtaccagcaaaccgatttcccgagcaattacaatctgttttaaaagtatctcctgcagcgatatctgcggcatcttcttctggatatttcctgacaaagcattacctgtatcagttcatccagaaaatcctccctgatagcctgagtgcttatttccggttccatactctccctgatcttgcagcttaaatgataaatcatatatttatccggatattcatcataaaggcggcttccctcataatccatgagatcacattcctcttctattttctcctgaatatgctgtacagtccccggataataggatttcatcaggttaaattctttatcctgcatccgttctccttcatacagaagaggatttgcatatgtggtataaaacggaaaatattctttcagatacatcgtacgatcctgcattcttttcgattgtctatttcagtatatgcaaagttctgcagactgtgccgaaatacagttcacgtgccgctttatttcatctacttcttgcagattacaattcctggatcattcttacagttaatttgacactgtgttcaattgccgccatctcaaactcagcgtaatccatgtgagcacttccgtctgccttatcagagattgctcttactacaaggaatggaatatggttcagataagcagcctgaccgatagcagcaccttccatctctactgcaaatccgccaaattctgaaatgatggcatctttaacgctcttatctgagataaactgatctccggaacagattcttccttcaaatacactgatctcaggatttacttctttacatacttttgcagccagtttacgaagtttttcatcagcagggaaggaaaattcatccatctgcggaatctgacctttcttatatccgaagccgattgcatccatatcatgatgcaaaacatctgtggaaagaacaatatccccaatatttacatcattattcagacttcctgcaattcctgtattgatcaccgcttccacaccaaatacatctgcaaggatctgtgtgcacatacctgcgtttacttttccgattcctgagcgtacaacaactactttctttccttccagagttccctcatagaaatccatacgggctctggatgtaattgtgacatcctgcattttttccttgatttttgcaacttcctgttccattgctccgataattccgatacatttcattattaaaacacctcttctttgtatattgtaatttttcattttcatggtatcaggttcagatgtgtaaacagtgacaaatgttcctgacatttctttattatagcaaaactttatttatatggaaactttttttatcctctgttataatacaattgctattttatgttactgttcatatatcactattccgcgaggtgttgtggcatgaatatgccaaaatcccgagacatacaagccaaaattccattgccgcaggcaatctggaataaattttggctacgttactgagaacgaagtaaacagtaacgtagtggtatatgaacagcagcatttatagttacattttttcacacaggaggaaacatatcatgacgtataaaacaaaaggtgtctgcgccagccatattgaatttgaagtagatgacaataagaaagtccacaatgtccgtttcatcggcggatgcagcggaaatacccagggtgtagccagtcttgtagagggaatggatgcagaggaagtgatcagcagattaaaaggaatcaaatgcggatttaagaatacctcatgtccggatcagctttccactgcactggaggaagttctgaacaaataaacaactgtggaaatactgaacagttacgcaggtgaccatataaaatatcccacgaaaactatagcaagcctcttaaataatgtaaattgaatcaatatattatttacaaagattgctatagataaagtttcgtgggatatttttttaatttacatatctgtcctgtcccatttatcacacagggactgaacatctcttgaaaatctttccagatctttattcggcgttccttcatttttcctgataaccgtaataagcctgtaaccaagtgccagaagtttctcgaaagctctggctgctcttgttgccttcggtgatgcagatgctttctggattttcacaccctttgcctcatacagacatacatcgtctgccagatcataaaccgtaccgctgaacggagccattgtatcataccccagttcatctgtcagacgttttgcaaaaatctctgtgactgtatcatctccatgagtaacaaagactttctgcggtttctcctcaaatgccttcgcccagtctaaaaggccattcacatccgcatgaccgctgattcccggcatctggcagatatgcgctgccacatgaacaggttcaccaaacagtttcacatctgcagccccctcgatcagtgctcttccaagagtaccgaccgcctgatatcctacaaaaagaatcgtattcttctcattccacagattatgtttcagatggtgcttgatacggcctgcatcacacataccactggctgaaatgattaccttgggctcctcatcataattgatcgacttcgaatcatcactggtgacggaaatcttcaatccagggaaactgattggattaattccctttttgatcagttccatcgcttcttcatcaaaacagtcatactgatgctccgagaaaatcgtggtagcttcatttgcaagaggactgtccacatatactttaaatccgtcatgtccatacaccagtccgtctgccttgatctgtctgataaagtacagcatttcctgcgtacgtcccactgcaaaagaaggaatcacaagatttcctcctctgtcaaaggtttcctggatgatttctgacaacagtttcacataatcaggcttttctccatgactgcggtcaccgtaagtggattccataactatataatctgcatggtgcagatactcaggatccttgatcaagggctggcaggtatttccaatatctccggagaatacaatctttttctctgtatcctcctccctgatcgtcagctcaatacttgcagagcccagcaaatggcctgcatcaataaaccgggctgagattccctctgcaggagtgatcatcttattgtacgggcatcccacaaagtttctgatcactcccatagcatcttccattgtataagccggaacaaattccggtttgccctgtcgtctgcctttacggtttctccattctgcttcaaacatctgaatgtgcgcactgtctctgagcataatatcgcataaatggctggtggcatctgtggcatataccggtcctctgaacccctttgcataaatagccggaagattacctgagtgatctatatgtgcatgtgtcagaagaacaaattctatctctcccaaagccactggtatttctgcattttcataataatccggtccctgctccattccgcagtctacaagaaacttgtgacctgctgcctccagataataacaggatcccgtaacctcatgagttgccccgataaatgtaatcttcatataaaaacctcccttcagattttgatgtactctcggaatctttttgatatccccaattgttttgctgcattttgcctgtttaacccggcaactttttactgcttttatgatccttctatattgtattaattatacactacaatgaaacaaattaacaatatcttttctgaaaacaaaaagcagaaacagttttttttcgactgttcctgcctttctttgcatctgccacgtaagaattttaaaaatttgccgatattttaatgattctctgtcggtcagtgcataaatatataacgttttgttccgagcctttgatccgcacccttatccgaagaataaaatgccggatttctgcttcgcaaactttcattacatatactatgcgaatcaaatcggcaaatatcacacaaaaaaataaaatttttttattttttttcaaaaacggatgttttctgatatgtctgcgtatttttatccggatatcgacagtcagctatagcagtcattcccaccagcgcagtcaacataactactgccactgcggcagctgcagatttcaggattctgtgagtcctgttccagtcatactcaagaatttcaagtttttcctttgctgccctggtgcttcctgtcttttcagccctggctgcttcattgaaatcccctgtttctctcagtcgggtgatcagccgatcataccccgcccggatcttctcctcggattcttccggaaattcatcccatgaggttttgcctgctacgttcaacaatgcggattcaagtattttggtttccgcatcatactgctcttgaagtatttggtctatctgctgattttttgtctgtatatctgttttgttcttcataatatttaactttccttgacaatttctccccctgggttcatattaaatagtaacgtatagcaattccataaaataatgaatccggacattttcgcaggatttcacatattcccggattccctgcagtcttttatagaattgttgtaactattcagaataaaacaggaggaatctctatgaaacatattgtgctcaccggcggcggcacagccggacatgtgactccgaatattgctctgatcccacgccttaaggagcttggatacgaaatttcctatatcggatcctacgatggaatcgaaaaaaagcttattgaagaaatgaatattccttattacggaatctcatccggaaagctgagacgttattttgatctgaaaaacttcacagatccatttcgtgtactgaaaggattcggtgaggccaaaaaattattgaaacaattaaaaccagatgtggttttctccaagggtggcttcgtgactgtcccggttgtaatcgctgccggtcgacgtaaaattcctaccatcattcatgaatcagatatgactcccggacttgcaaataagatctgcattccatctgccacaaaagtatgctgtaacttccctgagactgtaaaaagtcttcctgctgacaaagcagtacttacaggtactcctatccgtcaggaattattaaacggaagtaaagaggcagcccgcgaattctgtggtttcacagatgacaaaccggttcttatggtgatcggcggaagtcttggtgctgcatctgtcaatgaaaatatccgcaaaatccttccggaacttttaaaagagtttcaggttatccacctgtgtggtaagggaaaaatggatgaaagtctcaaagacacaaaaggatatgtacagtatgaatatattaaacaggagcttgccgatctgtttgctctgtctgatatcgttatctcccgcgcaggtgccaatgcaatctgtgaactgaatgctttaaaaaaacccaatcttctgatcccgctttctgcaaatgccagccgcggtgaccagatcctcaatgcacgttcatttgaacgccagggattcagcatggtacttgaggaagaagagattacagaaagcacacttttaaacgcaatccgcgaactgtaccagaacagagagtcctatgttcatgccatgtcagaaagcagtcatatgaattctattgaaaaaatcaccgggctgatcgaagactgcgtaaataaacagtaatcaccgggttattttcttatattccctggcaagccagcgtctcgtcctcatgactctgttattcacattattttctgtgatatgataatgtctggcaacgagacgcgttggtatgtcatataacgttacactgacatagatttcataatttgtcctgttcttttctctcagtttttcaaatatcgactgcaggtatcctgctgcctccagattcagaacaatctcatctacacgattaccttttcttacccgcatatctgtcatttccagaatcgcatctgagttcgcatattcatatttcctgaaggcctttttgcgatgatcggatgccttatggtagctgattctgacaatcagattctccagtttcttttcatctgaaaaatccacactccggcccatatgaaacaaagtctcaaatacatcctgacagacatcttctgcttcatcttcatcgccaaggataaattttccaatattgaacgcccgagagcggtatttcctgtagatacttacaaaatctatattctccatcttttgcaatgtgctgtatcagaatatcaggacagctgctcctttacttttaacaggatttcttctttatctgcatcactgagttcacccgggtgccatgtgattcccacctgatctcctttatatctcggaatcagatgcatatgaaaatgaaatactgtctgccctgcacactcgccattattctgtacaatattaaatccgtcacatttcagtgctgctgtcattgctgtcgccattttctttgcaagaatcattgcctttgcagccatttcatccgataattcataaatattggcagcatgcgatttcggaaggatcagcgcatgtcccttactcgccgggcccaggtcaagaattaccctgaaattctcatcctcataaagtgttgcagcaggaatctctccattagcgattttacaaaaaatacaattttccatctttaaatccttctttcttaaaattcaagattttgatttgcaataatcagtaatacttgtcgttttattgcgaatttttcaggacgaaatcagttgcggctgaaagttcacaatgatacacttttcctgaggtgataatatgcagattgaaataacaaaacaatcagaaaaagattttcgttttcttttatccagactttcacatgaaatccgtaatccggtcacgctgatcaacagtgaacttcagttgatggcttcctctcacccggaactgtgcagttacagacaatgggacagtcttatggataaccttgaatatgtaaaagaactgctgaaagaactctctgacttcagccatgcgcagacagttactcttgttcccgtaaatcccgcggaatttctgaccactgttttatcctgtcagaaaaacactctggactatctgggaatccggctggaaatacatgtggaacatacttcttcacctgtttttcttgaccggataaaaatgcgtcaggtcatatttaacctgatcaaaaattcctgtgaagccatcgatcagccaggcggaaagattattgtaaatctcacccctgcagattccggcatctgcatctgtattaaagataacggatgtggtatgacgcataagcagactgagaatatctttcatcccttcattacatataaaccggaaggaaccggtctcgggcttgcagtaacagcagaaatcatctctgcacaccatggtcagatcagggtttccagcactcccggtcagggttctgccttttatatttatctgccggcatcccctgaataaaggtcggttatcctgcacgctgcgaagggtgataaagcagaactgcaagcaggaatccacagataagaccgcctacatgtgccgcattgtccaccccttcgcttgtaaaaccaaaataaagcgaaaaagcagccatgatcactacctgtctggcagaaagatcttcaatatgacctctgcccctgatcacagcatagatcattgcacccatcacagcaaacactgcaccggatgcacctgccgaaactgcaaaatccgcactgtccagttccaggaacagacacagcagatttccacccattcctcccagaagatagatcagcagatatttcagttttccaactgtacgctccagtctgcctccaagcacaaacagtaccagcatgttatttccaagatgctgcggtccaaaatgaaggaacatacttgtaaagatcctatagtattctccctgcataatggcgggagtatatgccgctccgcactgaagcatatgcatggtatcctctgatcctccggtaaattccactgcagtaaaaacaagaatattcgccagaatgagaagcactgtaaccggtgcctttttcagttcttccaagttttacctcttttctgtttctttatctcaaaaacaatgtaccattactaattgtagcagacctcctgtattttgtaaaaacatttattccagaaatatatatcttgcctgtgcaaaatccacttcatcttccggttcaagctgatattcctcatccggacgaagtaatcttccatttacagacgttccgtttctggaattcatatcactaaggaaatagttttcttctttttttcgtatttttgcatggatacggcttacggtaggcaggctgatcaccgcatcacaggcagtttccaactttccgatcacagtcagatcttcattgagataaatggtcgccagttctcccggttctttgctcaccagacttgcaggtccgcttactgttccggcagatagtactactgtttcaccatagtccatatgtatccgggatgattcggaagttttttgtccacagtctgacattttctgcccattcaccggctgactctgatttgtttgctgatttctctccactgtctgggacaggttttcatataatctgtcctcccatttctgctctgacacttttccttctgcttctttccatcctgatcttttccctgatgttttcttttctgttttattccatgatggtatatttcttattttttctatgtgtcccactgtttctcctgatgcatacggctgttccgggaaatgcgaaactttttttgtctttataatacgcaggcccagcatgatacccgctatagctataacaattacaccaagtatggtttccatttccacatgtggcagatatcccttcaggatagcagctgccagtccacagatcagaacagcagccggcacaataacaccgaccgggttcagtcggccgggttcttttgaatcttctccttctcttacaaattcattccggttttcattatcttccgggaaagtctcttcttctgcaaactccatctcctgctctgtcttttttgcatttattttttctttcttctccccatttacatctgaactctgagttttatataattcttctttaatatgctccagatgaaaactgtcttccattgctcttttatatactccatatccaaggattaccgcatcctgatcctgatggtctattttcggcagaatatattctgtcagaagctgaaactgttctttaatatccttctcatatccgggcatcatacaaaaataaatctgtcttttttcaatatctgtataaatatattccggcgacattataaactgtccgggattgatcagatattccgccgcatcttccatagcctttacaaaaccaccgaaaataagcctgagatcttcaactcccatcttcttttcttcatacagcacattcaccgcctgtttcgaagtaatatcaaaatagataaaaaatctgccatccatcccctgtatcctgcacttcagaagagagggaatcacatttcccgcaagcatccttacctgataggaatctgtattgatctcattctcaccatagacaatgagataattatgattcatatccctcttatattctgtccgcatactattctattcccccatttctctcagtaccgcctgcgccgcccgcagtctgcggatatgtttcaccggatttatcactgcggatttcccttctgtcctcaaatgccagctcagattgccatacgatgagatcgtgtccaggtcataggttacctgcacttcttttcccacatttgtctgggtacctaaattctccgccccgaaaaagccaatactccccagctcctcactgcgcatccttgcagtatcatatatttctccgtttttcttaatcccttccatgctcccgcttactgccgattcataagctgccgctgtcagccatgccctgttatgtacaaaaaagctcagatagataagtcccatcaacaccagcaggatcaacggcatgacacaggcagtctcgattgtaaaacttcccttacgaattatactgtattcatttgttatacaaaaattatctttcatatcaaaaatcctcccagatatcctgccagcagaaatggcacaaacggtatttccgtacttccctttctgcaaaatcccatcatcatgatgccggaccatactgcactgcagatcattcccataaaaagtgttgaaaaaaattcttccgggtacagcactgtccccagtgccataagcagccagccatcgcccattcccacagcaccttctgtaaggatgctgatcagcaccaagagaaaacctgtccccacgcacataagaacctccggaacatttcttctgctatatattgtccacacagttccgcagactgcaaatattatgatcagcagaagagaaacctgcttttttctgatatctatccatgaatttattcccagaaatccaagtacacatatttcttttacgccattcatctccatatacatctctccggcaaaattcagccacacctgctacatgctcccatttccgaaacagaagaagcttttaccagtcttaccgaacgtttcagcccactgcaggactccagattatggtatctgtttccctgttccgtaacatataccactcctgccggattctgattcctgctgcagatttcacaggctgaataatgctccccgtacttattggatgcagattttgcggaacttccgggaatttgttttaatgaaacattcagataactgcagcccggatttttatggtacacactgcccgaggcagttacataaaccatcggttctgtttctccctgctctcctccattgtcaggaaattcggttcctgtccatgcatggacttttacatggttataaactacaacatccggaagaggtatcagtccaccaaagggtttatacgtgtagatatccggcagcgtaatatcatcaacactgtccccacccggaagatacgcatacattcccgcctgttttgccttcgtacacaatgcagtcagatgttccgtctgcagtttatatatatccataaacgaaatcagcgtaaccattcccaggaagaacagcggcagtacaagtgctgtttctactgccagacttcccttcttaatctttccccgaaaagaggtgcagaaagatacttttacagaagaaacttctccaatatgttcttttgcatttgtccgaaaatatttccgactcttttgggggaataaaagatcgtaaatattgcttagagagacttttctcctttcataaatttttttatctttttttccgatttcttcaatgctttgtttttctttctgtaaaagcatcttttcacacctcttttcagcaattcattcataacaatactgacgtatcacctgaaattcctttttcctgtttgcttttacctccgcaaatgcctccagagctacaacacaggaatccatataaaaatttgccctgcctttctttcttatcacatcttcgatcatatccatagctctcatcactttcttttcctttgaaacacgcaatatcagaacctgaaggtaatcctcataggacaatccatgttcattgtttttccgcatggaatccagtccttccatcagacttgaaagattagacagcgaaatctgccagtctgcggaagtttttacaaggggaatcttccctcctgcaaaaagttctctcacatccagtacgctctccgcaaatgcccagcataaaagcaatgcagactctatcactaccgctgccggaggaaccagaaatcccgacgcaatggctgcagcgagtgcctgtgcctctgttctttttacattatctgccatcaaacatgcaaagtttacgccttctctgatgaacaaaagctttgatgccacagatttaaggttatctatatcattgtctcttcctccaaaaacatattccatctgatatgcaagactttcttttgacggatctgtgtaatttcccagatgattcatcagatactgctgaaacaaaaccccggaagtataactgctatctgctgtcactccgtccggcatctccattccctgttgcagctgtcttcccgaaaccattgtgtctttgctgactgtccgggtggaaatttcccgtccgggtggcaaaaccagctccagtattcccattttcataattctttttataatactgatgggattgtcagcctgtggctgcgtcggtgctggctgggttgatatttgtccttcctgttgctgcctgttttcagctccctgtgctgcctgccggcttttctgagaagcctgattcatttctgaatcatatctgtcgatggagcctcctgtctccgcctgtttcgctttcagatccgcctcttctgtttttctctctcgatcagacattttgttgagaaggagctgtaccccctgacttccaagagtttcctgcatatactgcacaatctgctgataaaaaacctctccgcactcatctgtcagaagccggtaaccggtaagtccgctctgatgcagttcaagtttctgactgttctgctttaacaccggtttcatataggattccagattatcgcagatctttgcgagattaagctgcccgcctcccatggaaccatccagcgcaaacagatcatattcctcaagaagtttcctgtcatactgtccaaatacagaataaagtccgatatccatactgttgagtatttgggttctggccgatgccatacgtacagattctatacttgtacatacaagagacaaaagcagactgagtattaatgcaagaaataatgtaatgcttcctctttcctttccgcaatatttcatacaggaagtacacctccttctcttttcatcttaaatagaattactctgtttggcgatctttgaaagaatgctctgcaccagttcggtcagctgctctttgaaaataatgacaagcccgatcaggactacaagaatcaggatgatctccacaacacctacagcgtcttcttcctctgcgaatcttcgtatcagtccgtttttcttttttatctgtcttatcaattgtcccattttttccctccatatccaaaagcaccctttacgctgcacagaatttactgcagcaccttatcatgtttctccgtagaaagacataaaagcaggaatcatgacaattgccataacgacaataagcatcatgatcatcggcaccagaagttttgtggctgcagcctctccaagaacacgtgcttttctctttcgttcttcccatgcttcggttgattctctttcaagcatatcagccatctgtctgctgcccttctggagattctggataagaagcgtggcaaatgttttatactttgcctgaccacatctttctccaaatcttctgtatgcttcactttcagaaactccgctttccatctcatagcagacaatccgtatctcttcatacgcaggtcttggattccgctttctctttcttccataatccagagaaattttctggaatgcctttcttacagtcatcccggcctgaaccagaagtgtaaatttcatgatcagtcccggataatccataagaagttcttcataccgtttctgaagctgaacctgttcttctctccctttcatcacaagaattgccattgccgcaataagaaacagtcctgtcagaagcattccggaagtgtctgccggactttcccattttaccttttttccattcagcttatccggaagataataataatccggatcactgcgctgctcgttataccgggatactgcctctgcaatacttttttgtgcctgttcttttctggtcagcttcttattctgtttcggttcttcctcctgctcttccagttccttctccggtacctgaatgtacatggagaccggttcttctccgtcaacggataccataaattccttctcatatgatcctgtatcctccttttccagacggtatccctgaggatacacctgtccaccgttttgcaaagtaaggatcatgcccagcagatttccggctatcgctactaccgcaaaaagtctgataccatccttccctccgattccggaagatggaatccatccttttttccagccggtcagtgcacacaggatcataacaaaaatgacaacatgtacccacatttgtactgtcacacctcaatatctacaatccttctgccaagccagtatgccgcagcataaatgacaagacagatactcattgctgcaattccaaagggatttccataaagaacacttaagaagcccggtgaagtcatctgcaagtacaggataattcccacaggcataagactcatgatcatctgttctgacttctttgctgccagtgtagcctcaatctcttttttaacgtcaatcttatctccaagcatacgagacaccttctgaattacccggttcatatcaccacctgtacgcttggctgtataaaatacagaggcaaaattttcgatatcttctatctgacttctttctccaagatccagaaacagctcttccagcggaacactgatatgctgctggctttcaatatagcgaaattcctccacaatatccgttccctttccgtagagtctctccaaatctctgacacaggtttttaccgcgctttccaccgaatatccagcctgaaccgcaacactcagcgaagtaagtgcatccttaaactgataattcagattcttccgtctttccctgatcatacgatttttctgccatttcagataaaacacaggaacgggaagcataagaagcaacacccatttacttttgtaaaaaagataatctgccattatgcacaacgccagtgcctgtcccatatatttcagaagttctttcatagaaaaatgataatgatcataattacgtttctgataaagctgttctttttctttccctttcatagttcaatccccgctctttccagtttttccacatgaaggagggatgctgtctttacaagacctttcccttcctgccattgatacagcggccggatacggatttctccattttcaaagccgcacacctcagttacttccagcaatttccttgatttatccctcattcttcccagatgtaccagaatatccactccggaagcaatctgtcttctgattgcttccaatggaagatcaacgcccatcagaaccattgtttccagtctggataacatatccctggcagaattggcatgggcagtagacagcgacccttcatgccctgtattcaatgcctgaagcatatccattgcctctccgccgcggacttctcccactatgattctgtccggacgcattcgtaatgcagatttgatcagatctctgattgtaacagaaactgctccttccatgtttgccatctttgcttccagccggaccagattatcaattcccctgatacgaagttctgcattatcttctattgtgatcagtctttcgtccttggggatatattccgacattgctgcaagaaatgtagtctttccgcttccagttccgcctcctatgaccatggaatatctggccttcacaagcttctccagaaattctgcacattcctgtgtgatacttcccagtgcgatcagcttttccattgtaatggggtgttcaggaaaacgccttatagtgagaatcggaccatttaatgcaaccggataaattacagcatttaccctggaaccattttccagtcttgcatccacgatcggcatggattcattgatcacacgattacattttccaacaatctgctggatcacatcctccagtttctcagcagaagtaaaacttttatgccatttcataagcttgccagcccgttctacaaaaatggtatccggcccgtttaccatgatctcagtcactgtctcatcatccaccagttcctgaagcacatccagtttacggacagaataaaacagttcctgacgaagctgtaccttttctttcagcgcaagacggacatcttttatctggttcagaatcagctcatcaattacatcaaggatttctttatccgataattctctggacagatccagttcttccatcagcatctgccgcagctttctaaatacatctttgttcatcctttttccctttacagcatctttccggaacttttttaattttcttttttctgactttctttcctcagaaggttccgcacataatctcccagttcactccacatcagctgttcaacatacgcaggtgacaggcaggttgccatatgaaacggtggatttatcttttccgtcttttccagaatctgaggataatcccagattcggaccagattctcaaactgcgcaatcttacactgtgaaacagcatcagacaatacaggcatataaatcttcttacacatatccagcagctggaaattttcatcaatcccacatccaatatccagcacaatcacttcataagaactgtcaagtataagcatctgaaaaagccgttcccagtcctgccaggctgttgtacggatatctgccggcatctgcacaggtggaacataatccagattattgatcgtctgtatcatactgttcattttataaagaagattctgattatcctgcctcacataataaagaagatcactcagattgtgggcaaaaccttttcccatcaattcttcaaatccggaatattcttccatattcagataaagaacggctcgttctttggcaagtatctgtccaagtgtcaatgcaaaagaggttttcagacaacgtcccagaggtgaaaatattccaataatttctgttgtcttttttaatacagcaatctgatctgccactgtctttttttcggcgccataacatgccatcacttcccggagaacatcagaagaagactgatatttatacacacttggatactggtcaagttccggagggtgtaccccttccgacaaaatgatgatcttcccgatatccagatcccggacttcccggcacatagcccgcccggagatcaacagcaactctatatgtgtttgtttcccataggcgatcaggttctctacagatgtaaatgcctgtatctcaaagggaatattcttcttccggttcatatagtccataaagttcagcgcataatccacttccagatcgcatactgcaaaaatatttcttttcaatagatacctcctgcatataacaacacacttataaaaacaggaatcgtaaaatggaaattttcaggagcagcaatactttttctccgataggaactaatctttcccgtactgactgtacatttcacatattcaataaaataaaggatacgttcacagaaattgtggttaaagatcagaagtgcggcagaaatacctgcacctgtcagaaaagaaataaagatgcattttatgatagattcacagcccattatccctcccagtgcgcagaataatttaatatctccggcacctatcatcccaaaagcaaagaggatcataagaaataacggcattacgcttcccattataaaaaatccaattcccgtaatattcttttgccatatacagacaaacagtcccacagacatggaaaaaataatccatccgttatcaacttttgctgtacggatatccatgatcatggcagtcccggcaaccgctacaggaaaaaggtgaaaaaatgcatattgcatcacctccagtcttatatttttcgcaactgtttcgatactgttcatacaataggaaacagtctgtctcttctttggtattttaaaaaaataaaagtggaattaaccgccgaactgacgggattgaatcaccagaagaactctggtgagtattattataggaccggacaattgatttgtccagtcctattttttgtcgaatttctaaaatatttataaacttgttacctgtccacacgctgctatcccgaaatatactatgcgaagtgtattactgagaacaaattgaacagtaacataaacccggctataatgcacttcacagaaagaatatcatgcacctgtcaattagagttcgatttcctgtctgcatccttccggtacaatgataataccattttctgtatctttcactatgcttccaccagtaacatcagctatttcatgaatatttctcagcagataggtcatacctccattttctgctgaagcttccagagtgagtttatttccctctcttacagcttttactgtaaaagctgtctctcctttacgcgtcactacctcacaggatgcagtttcatttacttcataaacctgaatctgtacatctttctccagttcataatcaacggtagtatctacagcaccaatcggaagcagagtattctctcttacaaatacaggcagtgaagaaaaatcataatcttcttcataccatcttccgccttctttgacttctccgcttaaaagatgagtccattttcctgccggcagataatattctgcatgaccttctttgttgaagattggtgcaaccagaatactgtcgcctaacatatactgcatatccagatatttggttgcaggatcatcgttaaattccatgatcattgcacgcatggacggaatacctgtcttgtgtgattttacggccatagaatacagatatgggagtaatcttaatttcagctttgtaaacttacggcatacatctacagcttcttcatcaaacagccacggtacacgataactcttggaaccatggagacggctgtgtgtggaaagaagaccaaactgcagccagcgtttgtatacatccggtgctgctgtcatttcaaatccgcccatatcatgactccagaaagagaatcctgataaagtaaaggacagaccacctcttaagctctcagccatggaagcataggttgcagaacagtcaccgccccagtgaaccgggaactgctgtccgcctgctgtagcacttctcgcaaaaaggattgcttcaccttcaccctttacttccttcagcagatcaaatactgccttgttgtaaaggtatgtataataattatgcatagaaaccggatctgaaccgtcataatatttcacatcgaccggaattctctcgccaaagtctgtcttgaaacagtcaacacccatatcaagcaaagttttcagcttattctgataccacttcactgcatccggatttgtaaagtcaaccaggcccatgccaggctgccagttgtcgatttgcttgattcctcttccgtctgcacgctgtaccaggtatccgttcttcagaccctctttaaagaagttagttccctgtgcaatatatggattgatccatacacagatcttaagtcctttatccttataacgtttcagcattcccggtacatccgggaagattctggaatcccattcaaaatcacaccagtggaactctttcatccagaagcagtcaaaatggaatacactcaatggaatatctctgtctgccattccctggataaaggaattggtcgtctcttcatcatagtttgttgtaaaggatgtggaaagccacaatccaaaggaccatgcaggcggcaatgccggttttcctgtaagatctgtgtagttctcgatcacaccctttatgtcatctccgtaaataatatgatatctgatctcttcacctttcacagagaatcccacattctcaaccttctcacttgcaacttcgaaggaaacatgatcgctgtgatctacgaatacgccataatgtttgcttgttacatagaatgggatattcttataagaaatctgagaagctgtaccgccatcttcattccagatatcaacaacctgaccattcttcacaaacgctgtaaatctctcacccagaccatatacacattctccaggtgcaagagaaagctctgtcaccatatatggctgatactgtgctgccatatagtttggttccgggaattttgtcagagtagccctgtcatactgcatatagccaagattgcggaatccgatgtttgtgagaacttttccgtctgcttcatatgtaatcttaaagtctttcaagtccactcttactgtcattcttccggctttcatcacagcttcatcttctgtaatctcaacctctgtttcctgtggatcctcattcagctcataccttggctcaccttttacataaccttcataatgataacttcttacacttatgatatctttacgtgcagaaataaattctgtagtgatagttccgacatccagagcaccgcctctgtctgtgatctggcggaatggagaaacaattctcattcctcccggaattgcctccgctgtaaaagcctgcatcgcataggatgcgtttgcgcgttcatttttctcccagtaaccttctgtgaacttcattcctgatcctccttgcttttaatcttatgatttgcttattttccgaaattgaaactctttcagtacctcgcgggataacggactgctgaataattatctgataccagtatacatcatgattctttttcttaccagcaatataacccaatttttatctgtgcaaaaaacaaaatctgtatattgcataaaaacaaaagattgtggtaatattcttcaaaatatacacgttctacaagtatatctattttggcaccaggaggtaagaaaatatgtgcacagcagcaacttataaaacaaaagatttctatttcggcagaacccttgattatgaattttcctacggtgatgaaatcaccatcacaccacgaaactacccattccatttccgtcattctgataaagcccctgactctcactatgccatcatcggaatggctcatgtggccggagactatccactctactatgatgccattaatgaaaaaggtctcggcatggcaggtttgaatttcgtaggaaatgcagtctatgcagaaccagtatcggacaaagaaaacgtagcccagttcgaattcatcccatggattctcagccagtgtgccaccttaaaagaagcccgccagagactctcaactatgaatctcaccaacacacagttcagtgagaacttcccatgtgctcagctccactggatcctcgcagatgcttccggctgcctcgttatcgaatccatgcaggacggcctccatatctacgaaaatcctgtaggggtactaaccaataacccacccttcccacagcagatgttccagcttaacaactaccagtctctctcccctcgccaaccagagaacaccttcgctccaggattagaactccaatcctacagccgcggtatgggcgccctcggcctcccgggagacctttcctccgcctcccgctttgccaaagttgccttcacaaaaatgaactccagatccggcgactccgaactcgaaagcgtcagccagttcttccacatcctcggctccgtagatcagcagcgtggttgctgcgaagtagcaaaaggcaaatatgagatcactctctacacttcctgctgcaacacaacaaagggaatttattattataccacctatgaaaatcatcagatcaatgctgtcgatatgcatcgtgaaaatctggatacaacagtcctaatccgatatcctgtactcgcaaaacagaatatctgtttccagaattaatgtgaagcactctatacctgtggcaatttcgacaaatactctttaattatagccattgccatttttcagttctgtacggtataataaagacaaattattggtttcaaaaagaggtaataacaatggtacatttttttgatattacaaagttcaacttatataaagaagataaccggcgcgaagtaaaaaaagcaaatggcggccttccttcttctttatgggagacttactctgcttttgcaaattgttatggcggcgtaattattctgggagttgccgaaaacaaagatggaacctggagaactacaggtttaaaaagtacagacagggacaagctgttaaaacatttctgggatacaatcaataatcgaaaaaaggtcaacgtaaatcttctatctgatcaggatgtagagatatatgagaaggatgaagatactatcatcgtgatttatgttcctatggcaaacagagaacaaaaacctgtgtatattaatgatgatatatttggcggaacatttcgaagaaatcacgaaggagactatcattgtaccaaacttcaggtgaaagccatgctccgcgaccagacagacaacactatggatatggatgtactggatgatgttccaataagcgacctaaattatgaaaccattcagggatatcgcaacagacatcgagcccttaaacctgcacatccatttggccgtttaaatgattctgaatatttacgcagcataggagctgctgccatttccaatattgataaatgccttcatccaacagctgcaggaatgctaatgtttggagatgaatataacattgtacgacatttccctgaatattttttagattatcgtgaaattctggatccaactatacgctggaccgatcgcttacagtcaagttccggtgaatggtccggtaatatatgtgatttttacttccgagtatataataaacttgttaaagatatcaaggtaccttttaaaacaatcgatggaaaccgtattgatgatactcccgtacatgaagcattgagggaagccctcgcaaactgtttgataaatgcagacttttatggtgttcgaggcattgtagtccgaaaagaagctgacagaatagtatttgaaaatccaggatattccagaacaggaaaacaacaaatgaaaaaagggggaatttctgatcctcgcaacaaagtactcatgaaaatgtttaatctgatcaatatcggcgagcgtgccggcagcggagtacccaacatttttaacacatgggaggatcaaggctgggttgaaccagttatagaagaacaatttgatccagatagaactcttctgattcttagcttcgataaaaaacaagcgataaaaacaagcgataaaaaacaagcgataaaaacaagcgataaaaaacaagcgaataaatcctgtcataaaaaacaaaaccaaaaaactttggaaaatatagaaaaaatcagagagtatttatctaaaaacaatatctcaaaaaccagtgatattgctgaatatattggattaagtcttccgcgaacccgggctattttaaaagaaatacctgatgtatctccaattggaaataattcaaacagaaaatggactctgcaaaaataattttcaccagctaagaaacaagtcagaacatggtacaaagcaataaaagcatctacggaaagccttcatcagaccatccaaagatgctttttattgatatattttgtttctttaaatttctttatgactcgtaaccctaagtcgtgccatagctctggacagagccagctgattcatatgatactcctgaatactctgcttctgtctcatctgctcttctgctctctccttcgcttcctgcgccctgcggatatcaatctcctcaggactctctgccgtcagacagaacagcttcacacggttattgatcatctccacaaacccactgctcacagccagaatatgctttgtgccatcagcttcctcgaaacgcatttctcccggaatgatagcagcaacaatattctcatgctgtgccagaaaggcctgctcaccgtcaacagccgggattgtcagggttttggcacgtcctgcaaacgccagcttattactggcataaatctcaagaccaaatgtatctgccataaaatccgctccttattcctgacccatctcagtctttgctttctcgatgacatcctcaattgtaccaacattgaagaaagcattttccggatactgatccatctcaccatcaacgattgccttgaatccacggatggtttctttcagaggaacatatttacccttgatacctgtgaagttctcagctacatggaacggctgagaaaggaacttctggatctttcttgcacggaatacagtgctcttatcctcttcagaaagctcttccataccaagaatagcaatgatgtcctgaagttctttatatttctgaaggatttcctgtactttacgtgctacttcataatgttcttcacctacaacatccggctccaggatacgggaagtagattccaacgggtcaacggccggataaataccctgctctacgatctttctggaaagaacggttgttgcatccagatgagcaaatgtagttgcaggagccgggtcagtcaggtcatcggcaggtacatagacagcctgtacagatgttacagaaccatccttagtagaagcgatacgttcctgaagttcacccatctcagtagccagtgttggctgataacctacggctgaaggcatacgtccaagaagggcggaaacctcggaaccagcctgtacaaaacggaaaatattatcaatgaaaagaagcacatctctgtgttcctcatctctgaagtactcagccattgtcagtccggtttcagcaacacgcatacgggatcccggtggctcgttcatctgtccgaacactaaggctgttttttcaagaacaccggactctttcatttctgaccataagtcgttaccttcacgggaacgctctccaacacctgtgaaaatggaatatccgccatgctctgtggcaatgttctggatcagctcctgaatcaggactgtcttaccaacaccggcaccaccgaacagaccgatcttaccaccttttgcatatggtgcaagaaggtcgataaccttaatacctgtttccaggatttctacagccggtttctgatgttcgaaatccggcggatctctgtggatgacccatttctgttctccctcaagggaaggaccgtcatctactgtatcaccaagtacgttaaataaacgtcccagtgtcttatcacctacaggaaccttaatgccgcttcctgtggcgatgacttctctgtcacgctgtaagccttcgcttgcgctcagcataatgcagcgtaccatattgtttcccagatgatgggaaacttccattacacatcttttaccgttgttctctacctcaagggcatccttaatctcaggaagatttccatcttcaaaaacaacgtctacaacaggtcccataacctgtacaattttacctttgttcatcgtcgtcacttccttttttgtgcttttgcaccgctgacaatctcagtgatttcctgtgtgatggcagcctgacgcgcacggttgtactcaatggataactccctgagcatcttctttgcactgtccgtagaggactgcattgccatcattctggcattattttcactggcatacgcttctacaagacatccatagatcagaccggtcaggtaatttgggatcatggtattcagaagtacatcggctgatggtgacagcacgatttcctcctgtggcatgtccgcaagcattgcctgatttggcaggaactctgctttcttcaatggaagaagctgcatattcaccggctccattgcaactgcactctgcatctccgtatagaaaatacggacttcgtccagttctctgtccaggaacgctctgacaatctcctctgagatcagacgcgctctgtgcatggtcggtttctgtactgtatatggaaagttctctgcgatatccatatgtttcttcgtgaaatactgacggcctaccatacccagcacataaagcttgcaatgctcatgctctgccataaactgttctgtcattttctggatattatggttataggcacctgccatacccttatcaccggtaactacgatacagccgatcttacggtcttcctctgcgatcttatgacggatactgaaaaaaggatgctctgtatccggcatatgacgcaggattcgggaaattgctgcctgcatattatagtaatacggctctgtatcggacaggattcttttggccttctgcatcttggatgaagaaatcatatacatggcattggtgatcttcatggtgtcctgaatgcttttcattcgagtctgaatctctttcgtactgcccatatcaacacctacctgctcttatctgcaaattcttctgccactttcacgatcttttctgccagttcatccggcagctgtctcttctcctcgatctctcttccgatttccggataagcactgtcaaagtagtccagcatatctctctgatacttcttcatcttcttggtttccacgtgcatcattgccttgtgtgttgccgcacaaagagtgatgacctgctcatgaagacttaacgggcttgaaagcggctgtttcagaagttccataagtccacttccgtatttcaactgctgagttgtagcctcgtccagatcagaactgaactgtgtaaagatttccatctcacgatactgagccagatcgatacggacacttcctgctgctttcttcatggcttttgcctgtgcagcaccaccaactcgggatacggaaagacctacgttaaccgccggacgcataccggagttaaacaggtcactctccaggaagatctgaccatctgtgatggaaataacgtttgtaggaatatatgcggaaaggtcacctgcctgtgtctcaatgataggaagagcagtgatagaaccaccgccagccttttcattcagacggctggaacgctccagtaatctggaatggagatagaatacatctccaggataagcctcacgtcccggtgaacgttccagaagcaatgacagtgcacgatatgcaactgcatgcttggataaatcatcataaaccattaatacatcttttcccttatacataaagtactcagcaagtgcagtacctgcataaggaacaatatactgaagcggtgcacagtcactggctgtagaggagaatactgttgtatagtccatagcaccatgtttctccagagtagatacgatcttagctactgtggaagctttctgtccgatcgcaacatagatacagattacatctttgcctttctggttcaaaatggtatccagtgcaacggaagtcttacctgtctgtctgtcaccgataatcagctcacgctggccacggccgatggggaacatggagtcaatagaaagaatacctgtttccagaggaactgttacagattttctgtcaataattccaggtgccggattctctaccggacgatacccgtctgccttgatctcacctttaccatcgatcggcgctcccagagcgtttacgatccttccgataaaagcgtcacctacaggcacacctgcctgcttctgggttcttgctacctttgttccttctttgattcctgtatctttaccgaacaggatacatccgatgctgtttgcacggatatcctgaaccatacctttcagaccattctcaaaggttacaacctcgccatacatagcatgatcaataccatgtaccgtggcaataccatctccgacggagatgactgttcctacttcctggtccttgctgatttcgtcataattcttaatttcttctttcagaatcgaaatgatttcatctggattcattgcagccaacttttattcacctccgtgtcaatttctgtcttaaattgttataacgtccgcggagactccagtcgaactctttgtctccggcagaaagaatgaagcctccgatcaaagatttgtcttctctgagagtaaggattacttcctttgctccaaattccctgcgaaggaaatcttccatcttctctttctgggcttcttccggttttgttacatatgtgagaacagctttcaggattcctttctgcttgcggctgtaattgccatatgcttccaggatatcataaatgctgctgattttctgatatttacaggtcaccttcaggaaatttttcatctcctgcgggaagactctgtcaattacatgttctttttcttttaaagaaaccagtggattctcaagggcaccttttaactgcggggtacccctgaaaatcttttctgtctccaaaacagcttcttccgggacagaaagctcatataatgcttttgcataattaatgcttgtttccgtcattggaatcacctgcctcttttataaactggtcataaagggacaaatcctgctgactgctgtttttctctcccatgatctttgaggctgcatccagcgcgatctctgccactctgctttccatagccttcatagcattttcctgctctgtcctgatatctgcctttgctttgtcaagcattgcaccagcctgtgtgtttgcatcttttacaatacgctcagcctgtacttttgcctcatcctttgcctggtttacaatacgcatggattcgtctttcgcagatttcagtgcatcttcatatttgcctttcagttcatatgcctgttcttctgtatctttggcacttgcgaactgctggtcgatcatgttttttctctgctccatcacattgaggatcggaccaaataagaactttttcattaaaagataaagaacaatcaggttaataattgtaaagaccaggttgatgttaatctcgatcacctgtcccacctgcctttcttagttattctttatccattaattagccaagcatgataacgatcagaagaccgataacgaaaccgtaaatagctgttgcctcggcaagggcacatcctaaaagaagggatttgctgatcttgctttctgcttccggctgtcttgcgattgcttctactgctttagatgttgccataccaataccgataccagcgccaatacctgttaaaactgcgattcctgctccaatagctactaacataactttttcctcctgttgtttaactgaaataaactaaatattacaaatctttcttcacaatatgctatcctgtcgatattccgataagatcatttgatgcctgtgcaacagatgtctgtaccaacggttgtttatgaccgttatgacccaccaaatatccgaacagcatttaagtgctgttcataactgctgtcttatcccttatgtcccgcgtctcaggtcttatataggtgtcatattcctgtatgaacagtaatcttttttattcaatagcttctttgataaataaagaagttaagaatacaaatacatacgcctgaatgaatccgtcaaagaaatcaaaatacaggctgaatggaataggaagaactgccgggcatataaactcaagaagtttcataaccacatagcttcctaacacattaccaaaaagtcgcatacaaagtgatgtcggtcgaataacgacctccagaatattaatcggcagcataatcggtgccggctctgcgaagcttttaagaaagcctttcagacctttcttatggaatcctgcatactcgatcagaaaaatacttgtgatcgcaagaccgatcgtacagtttaaatcctttgtaggcggtacaaatccaaacacaccgaaaatgtttgcaattccaatgtaaatgacaactgtcatcagatagggaatatacatttttccctcttctccaaggatatccttaaagaagttatgaagaaaactgacaccggtttccagcaaaagctgtttcttaccggggttttccacactcaggtttcttacgagcaccaatgacaaaattaaaagcactgccatgatcacccatgtcactgctactgactctgcaactggtattcctccaaacaccggtatggtaaaaactgtcttacattgaagttcttccattaacgtgtctgctaaattacccgtttcttttccctcctttttctatttaaatctccggaagatattctggctttttatgctgtctgcctcagatgcctcagccaggattcctaaacttatgtctgtaaaatatttcataagctttccatcgattcaagattttgagattattatattaaaatccgttaaaaagtcaacaattattttgactatttctggcaaaaatagattttctttttgtgcatttcatccagacattttgattgaaaaatagattttcataatttttttaatgcattttcacgaaaaaaaggcaattttcattgaccgaactgtaagcagatgatattattttatatggtttttatataaattttatatctctgcacttaccaatccttatattggtaataccaaacaggaggttttttatgcaaatcatttgtctgggagacagcattacggactgtaatcatttatttgaagattttcctctgggaaatgggtatgtacagatactctcagaaatgttccgtaatcaaactccttctttctccatatccgcaaataccgtcagacgctcatcaagcgctgtacagttaacagataaatcaacaggtgccatacatttcaggaactgtggaatagatggcttcactgtgacaagagtccttgaaaatatccgccaacaccgtatttctttgcatcactctcctgttgtaactctgctgatcggcatcaatgatatcggtctgataatgaacacagaccggatggattctcagaaagaacagatgataagagagtttgccactcattacaatgaattattggatctgctcactgcagatgccaggcaggtaatccttatggaaccctttatctttccacatccggaagaatatgagacatggattccctatgtccataccatgtctgatattatccgacagctctctgtcagattcagacttccatttctgcctctgcataactattttaataaggaagcaactcaatcgggatttgatgccataacaacggacgggattcatcttactttgtatgggcataagcttctggccgagaaactgttccctctccttcaaagcattgataacaatccctgaacagataaactattgcgcattttcccggaactttgtataataaatcactgtcctcgctcatatctgcggacttattatggaaaggagtcttccttatattatggaaactacaattaaacagattgaagatatgtctctgaatgcctggccatctcacaagatggaattatacgacggctggatcctgagattttcttatttttatacacacagaaccaacagcgtagaacagttcggcaattccaccctcacctggcgggaaaaaatcccatattgtgaaagcgtatataagcgtctgggaacccccgctgtatttaagatcagtcctcttgtctctcctgactttgattatgttctggaaaaccgtggatatgctatccagcataccaccaatgtcatggcaatgagcatgaacgccgcacggctggatgctccatatcctgatgtaaccttctgtgacaatattccctccgaatggattgaaagtctgttccgtttaaaaaacaccaccaatcccatccaccggaaggttgttccatctatgtatcaggcaatcctcaaggaaaccatctgtgcttccatccgcatggacaaccagatcatcgcaaccggacttggtattctggacagagattatatcggcatctatgccatccatgtcaaagaagaataccgcaaacatggctatgcccgtcagatctgcaccggacttctgaaagaaggaatgaaaaaaggtgcacagaatgcatatcttcaggttgtagaaggaaatgacaatgcccgcgctctttataaatcgctggggtttcatcagctatacacctactggttccgcgtgcagccggatgaaaacggaaatttcccgcctgagaaataaaaaagaactatctgtaaagcattttcattttctgcttttacagatagttcttaatttttatagattttaacttttctttttcggggaatcagttgattcatttaacatagttcgcgccaactatgttgtatatcattctaaaaaattctttacgcaagatgtgcgtcacagtttgtgggagattttgttcggatgagggcgtcgtagtggactacgacaaccgaattcggacaaaatataccgcaaagtggggcgtgtagattgcgggaatgatttttcagacacactctaatattcaagtcttattctgtattttatctctgacttaattatactgttttgtttttcagcactgcaggtgatgtattacctaccaccattgctgtcagcgggctgaaatacagcagacatgttaatacacagtaaatcgggatcataattgcaaactgtaccagtcttccgggcatgatcgcatagaaattatatccaagcatgatcacaagtcctgctgttgtaagcaccagagagctgagaactgcagttaccacgatagatacgcagataccaactgtctttcctgttttctttctgtttgcaaataatggttttgcaagggcaggaagcacaccccagaggattgctgcaactgtgataaacggatttacagcatagcctttcataaagcacccgataatatctgcacataatccacagacaccgcctgccaccggtcccagccacagacctgcaaggattgtacatacacttcccacagaaatacggtacgcaccaagatcaatgaccagaactcgtgtgagtaccagatgcatggcgatcagaagagccatgaacaccaatgtttttacgttccaatattgttttttctgcataataaaaacacctccataatgtgtttaaaaaatagagtagttacataaataataatccctccacattatgagatgctctcatatgtagcaacgggtgcggaaatcatatcgtaagcagcacgcttttctgcttttcgtttcacggcgactccccagcctgtgaacacttgacgcataaaatcctacttcgctattatttatttatcgaaattataacacaatccatagaaattgcaatatattttccgttattattttcacaaatttgaatgctgttttttgttcattctatacgaatggtctgctttttttacttgagaatattgctgcaaacactcgtaagtctatgaataaaacagccgcatatactaatactataacattatgcagcagtccggcatcttcagaaatgagaaattacatgaatacagatatcccgccccggtctgctataatcatggaggtaaaaaatgtcagaaatatgtaaaaataactgccaaaatccttataatatatgttatgataattacctgaataccaacgcctgtacggaatgtaccggcctgatatgcactcctgccaaagataatgacgaatgggaaagctaccggaaaatttttgattttatccccgaaccgccggaaagcaatatccctccctgtaaataattattgcatacggcaggaatcatgttcaaacgaatgatttatcggaggtcctgtctatattatgaaaaaactgcttgctgcatgtgtctgtgccggccttagcttttcttttgccggatgcagccctgaaaccatactggaacaattcacatccaccggagacacatccgtccgggaacttacttcttcatctgacaccacaactgaaaccgaaacaaaagaccgtatctatatggatgaactttccggtaccctgcaggatttttcaggaagccagcttattctgaacacggacagtgcctcctatgtatttaatgtttccaatgccactctggaatgtaaaggcggcatgatcaccggcgatgagatcagtatcatttacgaaggtcagctttctggtactgacacaggcagtgtacatgttctgaaggttgtagatgaatttcataaaaaaaataagctgaaaaagcgcactgcgcatgggcaggtcatttccctgacttccaataccatcacaataaaatcaaagaaaggaaaaacagccacctatccgatcacaggaacaaaacaatattatcagaatggaatcaaagccggtgactgggtttaccttacattcaaggggaaattcccggatacctctaatgattcttccgtatccttaaatgccagtcacctgaaagtactgagtatttctgatctgaaagatctggaaataccggatcctaccccaactccagatccaaaactcacacagacaccggagcagatagaaaataaagaaaaacagctgctggcaactgtacagggagtaaatctgaatatcctccggattcttcctgccggaagtgacacctcctttaatctggatatgtcagcaatccccgcttacttcaagggaggaattgccccgggatctcatgttaatgttacttatatcggagatctggaaacaacatccctggaagaagtccgtattattgctgtgacaggtgaggatcctgataccattaatgacaaacatatttcctttacagtaaccggcacgattattggaagtactgccaacaccatcactgtacagacagatgacggtgccatagataccttccgtacagaaaacgcgcaggatctcactgcaggcggcatggaatacggcgactatgtgtgtgttaccttccatccatccaaatcaaaatcttctaatatttatacagcaattaaggtacaggatgcgtaaattgttactgttcactccgttctcagcaacacgcttcgcgatgcaggaaatatgaacctccttgtgcaatgcccaaggagtattgtttgcttcacaaacttaatttatgctaatcgcataaattcgcgcggtatgtctcgggttttctgtgaccttcgctcacacaaaacacctcgcgggatatcaccagtgaacagtaaccgtaaatttcttcttgatttccgcttcaccttccgcaagccagcggtatgcagcatcctgatctcccaggatttctgcaaaggactgaacttcatcccggattccttttccatgaagaactctgtaagcccccgcatcacttccgggggctatttttattcccagccggaatgcttttctgatattctcttctgcggattctatgatcggtttcagagtctcatcatcataacgcccgtctcccagaagatttctcactgtaaccagagtcggaacccagactgtatcgctctctgccagcatggcaaggctttcttcattcatatagtttccatgctccagactgtccactccggcagccaccgctgcctgtactccgtaatctccgttggtatgggacatgacagccataccttcctcatgtgcaatatgtaccatttcctttacctctgacccatccagaggtgttccggtaatcgctccatgttcattaaaatccagaatcccggtagtcatgatcttaataaaatctgcccctgcctgtttcgcctccaaaacacgcttatgaaattccaccattgtggcaaaaccatttcccacaatagaaccataatgcccttctttgtgaatggcaaatatcggagttctgtaatctattccatactctggtgcaagctctttcgctctcgcagaaacacccagcgcatcaccgccatcccgtacaaaaacaattccccgttccttgtatgctttcagatgctctcttatgatcttatcgtccggtccatttttatgcatatcaattgcatggcggtaattcacgccatccataatgatatgcgcatgacattctccaaacatttcctgtttctcttcctcttccctgccgctttcttaactcaaagcatagagtcagacagataaactcatccgcttcgctatgcagctctatactcaataacgctccacaattttacttaatcttttatctaccgttttttatttctcgaaaaaatttcggatttcgtcttctgttgcctgcacagacccctggacaaagaatggctttccgccgcctcttccgtttaatgcagcattcatttcctttgtatactgccgtaaatctccgtcaatctcgcccatggcatacttatagcttccatcttcatttctggaaaatactgcacagcagccctcacaggtattcatcactgcatccgcaagtttacgtacagaatctgcttccagaccttctttaaagatcaggacacttcctgcaccttcccatttcttagcctctgccctaaacatctcttcttccatacgggcaacctggcctttcatacggaaattctcatcctgaagatgctgtactgcatctgctgttctgtccatctttgcagaaagcttcatggaaatctgatgattctgctcattcaccatattcagataatccagaacacgtttaccgcagatcatctccatacggataccatcatggaatttcactacagagagaagcttcaccattccaatctcacctgtatgtgtcacatgagttccacaacatgcacacacatcaacaccagggaaagtcacgatacgaacctgtcctgtcaattctttcttacttctgtaatcaatagttttcagttcctcagcatcaggataagtgattacaacttccctatcctcccacactctctcatttacttcccgctcaatttctgcaagctgcgagtcatccagcataccattcaaatctacagtgatcacatcgcttcccatatggaaacctacattatcataaccatacttctcatgaataataccgctgaccatatgctcaccggaatgctgctgcatcaggtcaaaacggcgcacccagtcaatctttccctcaaccttcgcacccacttccagagccttatcagtataatgaagtaattctccatctttctcatgaacctctgtcacctttgcatcccccagtgttcccacatcacttggctgaccgccgccctccggataaaaagcactctcatccagaatgacagcataacctttcttttgctctctgcactctactacggttgcggtgaattcttttttatatacatcttcatagtataaacgtcttgtttctgtcatgatctgtctctcctttttcatctgtcatattgccccgcattatcttccacataaatataaatgccatattttatttcattgcaatcaagtatagaccaaatcaaaaggcttcgcaagaccgtcactcagagatattttctataaaaaaatccgttaatcaaaacagccaataaccagcgcagaaaaatagtttgttttgtgtgcatttgcaggatacttagatattcttagctggcaaaaatctgcgttatgagaaaaatgacacactgtctgagccgccatgcggcgagtttgtggcatttttctcatgcctttagcagatttttggcagcttagaatatcttagtgtccgaaaccgcacacaaaacaaactatttttctgcgcgtcccttttttctcaaaatttccaatatctgaatccattcccccacctcctgcgttataattaaatgaacaggaaaaaggagacagtaatgatcacagaaaagcaatatctggaatatctgattaagcaatatcagaacttaatatattcgatctgcctgaaatctgtcggtaatccatttgatgccgaagatctcactcaggaagtctttctgtctgcctataagaacctttcccgctttgatggtaattatgagaaagcctggttaagtaagattgctgtccgaaagtgtctggattatctgaaagcagccgggcggcgaagtattccaacagaagacacctacttttcccagattccggacaggcaatcctctcccgaagatgaatatatgaaaactgcatccaatactcacgtagaagcattgtgtatgcagttgaaaagtccttacaaagaagtcgcttacgcacatttctgcaaagaattatcagtacctgagattgcacagcagacagggaaaaatccgaaaacaattcagacacagctctatcgcgcaagggcaatgctgaaaaaaatgcttgaaaggggtgattagatgcatattaataagaaggatttaatagaatttgacaacggaaatatgaacacacaggaagtcattgagtttctgtcacatctcgatcactgcgatttctgtctggatcagatgatggaacaggaaaacaacagtacggatactgctcccgcctatctgatggaacagattctggacaaagcagactccggtgaagtgcagcttgcccgggcagcaaataaagcatccaggaaaatccagctgctccattacagccttcagactgctgcaggtgtgatggttgccctgttgcttttattcagtatcccgaacccggatttcacctccttacatcaggatactccttctcagacaaacagaatattgcccgaacatgaaaacggcaggctctaccagttcaccagagaactcggacagaacattggtgatggcaccggttcttttataaaatatgtcagtgatttttccagcaaattaatgaatggaggcaaataaaagtatgcaaaaacaaaaacgtggattctggctttttatcttctctctgatcccaggcgcaggagaaatgtacatggggttcaaaaaacagggaatcagtattatgtttttattctggggtgtctttgccatcggagcatgtaccggaatggactggcttgtgttcctgattccgatcatatggttctacagtttctttaatgtgcacaatctgaagtctctttctgaggaagaattttactccatagaagattcctatgtccttcatatggatgaactggcaggagacatcagttctctgctcaaacatcacggaaagataactgcgattctgctgattttccttggtgcttctattctgtggaacactctggtagatttcctctatatgatcttacccggatatctggctgatgttatcggcagattcacatatcatctgccgcagcttgtgattgcagctgctatcatttttgcaggaatttatattctcacccgcaagaaggatgcactggatgaagaacagcctgacagctttactgaggaagaacattactggacaccttatcgtccgtatcagcagaatgttccgaatatggaaactgacgcggttaaaaataccacagacacagtaaatcctgattgctgtacagatatcgatgtcacggataccgcaaacaacaaaagcccggtatctctgaaaaaagattctgctgccggagtgtctcaggaggatgcttcatcacaaacaacaaattctgaatcatgacacaaaatgggattgtcacatcaaggaatctaccttcatgtaacaatcccattctcattatcctcacatggataccgaaacttctccaaaggacaatattgtctcctgtccatcttcttcccgtactttcagccgtccgtccctgcatatctccaatgcaaatgcctgtctggaagagtttccgtctgtaattgtgatctgatgtcccgggatcatgttatgtgtcacataatccggagataatttcagatctgctgtttcttttctcaactcgttcacgatcattgcagtcagtttattacggtcagtctgttccgcatcttcttttgtctcataaagggctcctgctatacttcttaatttctgcggcaggttctcctggtccagatagaggttcaatcccatgccaactaccacaaactcaatatttccactctcaaaatctgtgacagcctctgtgagtattccacagactttctttcctttataaaacagatcattaacccatttaatatcaagctggattccacagagctgagcaactgctctgtagactgccactgctgccgcagttgtgatcagcagactgtcatgtatagttccctgtggcttcaggatcacactcatgtaaagacctgtatctgcaggagaatagaattcccggcctctgcgccccctgcctgcagtctggctcctggcaatgacaaatgccccatgtccggcctctcccatcatagcttctttcttggcagtctggttcgtagattccagttcatcataaatatctaccttaaccttcggatcatccagaaacaggcggattccctcctgcgacagacggttcgtatccttcgcaagcatatatcctttattcggtcctgcttctatatgatacccttcttcccggagcgactttactgccttccacactgctgccctggtgcatcccagctcaccggcaatgctctcaccggaaagcacttctcctttattcttctccagcatttccaaaagacttgattttacagtcataatttccctttcttactttctgtcccattattttcacgttatctcttctctgatcatctactgctaatcatatcatctggtatgctttttgtctaatgttctgccggaaatatcttatcacataattttccggtgttactgttcactccgttctcagtaacattttccgtatagtaatcaattgtctgtcaggattgccacaatccccgcatataacaccataaatcccataactactgcaaccatgtcagcagaatgaaaatcaatattaaatatcataccacctgcaaccatcacttccaaggtgacgatcagccccaggatcactgccattgtccttgaaaatttatgtctttcctttcttctcattctctgtgtggtatttactgcattcatcattttactcctccttcatgtcagacagataaaaatcgcccttatcctctgatcgattatgtccgaacatattttccgaacatgtattcgctttcttttgatatataataacatacccatttcaaaaatggaagagtttttagaacatttgtttgccgtttttttcattataaatttttccggatactgaaacttaaaattaagaaagaatcctgcccggagggcttttttatgttataggaacattacggagtaatttcctataacataaaaaagactgccgtgccactcatcacctgccacgacaatcctcttatctgattttaatgttatattttttacataaactgagcaaacacagatgcacctacaactgtcagcagacctgcaaccgcaatcgcaaggctgctcatggcaccttctatttctcccagctccattgcctttgcagtaccgatagcatgggcagaggttccaagtgccaggcccttagcgatcggttcttcaatacgcgcaagtttgatcacagtctctgcgatcatatttccaagaacaccggtaataataataactgcaaccgtaatagtcacaatgcctccaagttcttcagaaacccccattccgatggcagttgtaatagatttcggaagaagtgttacatactgctcatgactcaggctgaacagcttcgcaaggatcagcacactgaccagactggcaagcacaccggaaacaattccaatgattacagctttcagattctttttcagaagttccatctgctgatacagcggaactgccaggcagaccgttgcaggtgtgagcaggtagctgatatactgaccgctctgattataggtgtcataatcaatatgcagtaaacaaagcaccgctattactgcaatgatcgcaatcagaagtggattaaaaattgccatcttaaattttcttttcaaaagaagtcctgcctcatatgcgatcaggctgatcgctgcaccaaaaaacagggaattactcataaattgtgtcatgatcttttctgtcctttctttctgtccatacgaataactgcctgtgtgacacgacctgtcacaatcattaccacaactgtggtgatcactgtgatcagaatgatcggcacacataccggtttcagtatgccccaggctgtcagtaatccgacacctgccggaataaacataaccggcatgatctctatgagaaattcagctgcttctttgacctgttccagcctgataatgtgtgttcccagtgcgatcagcatgatcaccagtccgtacacacttgcaggtacaggaagcgggatcagaacatgtaatgcctctcccattgcggatatcagtaaaataatccagaattgtcttacgtatttcattttcagtctcctctaatccttactgaacggctacaggcttcatcattccatttacctgatcctcatactcctgagtttcctcaagagatgcacgaccggtcctctggatctttgtcacgcccggatactgtcccgggaaagattccagcatgatcccatcgccgtatatctttactttatccccattttccaatacatcatcggaaattaattttccttttttattgtaaatgccctctgccggtatgtctgcgctgaaaatagttccattgttcagatccacaaaaactccggtcttcagaaattctcctgtctcgatatagattgcagaaatagcatttgcttcctctttctgctcctcctccctgaccatctgtgcctgctttcctaccatattccagaaagcacctcccattacagcaaaaatggcgagcagaacaatcataccgatgataaacttccaatctcgttcttttttatttttcaaatattcaactcctttatattggtctaaccaatcttggttcattacgtttttttattatagcgtattcatcacaaattgcaaggttgtttctgcgtaaaaaaaaagtttttacagaatcctgatcttttctgcaaaaactttttcttctatatattatactgatattatactgtggtaagcagtgcttccatccagacttctttacgaaaaagaataaatacgatatactttacataaattataaaggctttatccaaaggattattgaagtagagactgtgctgttacacaccccttgggtcaaaagaaatgtgggaaagggcacacctaccaataattcttctctcccatatatccgaaaatcgaacgccatcgaagtttagatgcacataccaaagttcctgtgtctccatcttccagctctgttttatcttcgcagtcgctccaaatgatacaatcctctttcagaattatattggaatcgagtatttcgcatgaatagcgttcgtctgccggaaataactttaagtattttaatccctgaaattccatttcaatcattgaatcttcttcatactgccgttgtattattactctcagaatcctgcgatcgtttacaggatacatatccaggttttcattaacatatgctccgctcagataatgcatctctttgatacagctatcatggaaaaacgacactctttccataaattccttcagcgaattctcatctgtaatctcattccacttgtgcatattatcaccactttcattactgtgtatttcttcttctctcctgaccaatctactttgtcttctgtttacttttcaggaatcatggcaaccttttcccactgataggttccattatcgactgtcattactgccatggtaatctcctggtcgaagcgtctggggccgcagcttcccgggtttagccataggcggctgtctattattttttcgaaatatttatgggtgtgtccgaagattaccacctgtgtgtcttttaaatcccagtctacgtcttttttattgtgggtcatgaaaaatttcacgccttctatggtgaaatgtaaagttttcgcaattccctctgcccagtccttatcgttatttcctcggactacataaatagaacccatcatacgcagtgtatccagaatttccggtttgtttacgtcacctgcgtggataatacagtcgcaaccttttaaaatttccagtatttccggcctgagcaggccatgggtatctgaaataatccctattttcttcatacactatttcctcgctaatcattctcttataggccgttttataatttcatcattctatgtttaattttcctcaaacaattcaatctttccatattccccatcataccccggaattctcttcacatttccggttcttacattttcaattccttccgcaatccgttctcctgcacaggatttaatatcttctgacggtacatttcgcagaatgtcgaattctgtccccagtgtctgaatcatctgttcaaaacacccctgcactttcttacttgcagtggaatagcccatacatgtagagatcacttccggcagaggtacaaggctttcatatttcttaccatcttttttcacaaaaccttccgctctgtctgcaagctgttctactctgtgatctacgcccatggtcagcttctttccgcagacagggcagattcctccaagccgttctgcttccaccgggcttaatgatacaccgcattttctgtgaccatcgaaatgatatttcccctcttcaggaaaaaattctactgttccttccagcccttcgccagtctggattgcccgataaagtccttcataggaacagtcaatatccaacagattcgcctcgcgccccagcttagacggggaatgtgcatctgaattggatacaagctgatagcggtccagtttggaaattctccagttcatagccgggtcagaggaaagccctgtttccagtgcatgtatatacggtgccagttcctcgaaacattcctctacagaatcaaatcctgatttcgcacctaatacagagaaatgtggtgtccagatatgagccggaatcagaattccttccgggcatacatccagcatcatttccagaagatcatgactgtccagaccaagaatcggacgaccatctgagtgaatatttccgattttttccagacgctgtgccatggcatctgctgcctccagactgggaagcaggattacattgtgtacttttctggtctttccatttttcttataaatagaactgatttccccggagacaacaaaacgtgttccttctcccgggaacttccggctttcttcttttacatattcatctctgagacgatacaggccgtttccctctgaaacaagtctctccttcagttcttctctccataccggatgcgtgaaatcacctgttccaatcagtgaaattcctttctttctcgcccagaaatccagattttcaggcgtgccctctttgcttgtcgccatggaaaacctggaatgaatgtgcagatcagctatcattttcattaacatttatccccttaaattcacataaaagtatttttttcaagagttataaaatatcaacatccaaagatatatttataacttccatccgttttctttcagccacaacttgtacgtctcatactccggcattactttcccgacctcgtcccagaatgccttcgaatgattcatttccttcagatggcagagttcatgtaccactacataatccagcacttccggaggtgccagtatcagtttccaattaaagttcagattcttctcactgctacagcttccccatcttgttttctgttctctgatggtgatattgcggtaagaaacgcccatgagtctggcaaaataagaaactcttttggtaatcgtttcttttgcttttcgtatatagacatttcgtttcgattcgctcagatctgcgctcagcggcttctgttcccggtattcttttgtccgttccagacatcccagaacccactcctgcttctggtttacaaatcttttgatcctcggcagacctatacggagaggtgcgcgaacgattacgtttccatccctgcgaacctccagagtcatggtttttctggcacttcttatgacctgatattcgaattctccgcaggtgaatttctcctgattcttctctgttttatccatatccattttgttcactcttgtcttttcatatgtccccacccactgtttattgcttttcgcaatttttattttttgtttcgaattctctcatccatatattcctctatctctgctgccagaatatccatcttttcctgtgtttccggcaatgcataaggaaccctgtccatgattctttttacataatcatgttcacgcatgatctcataggtttccgggaaattgatgtcataatactgagcaatataggaaatccagtagtccacttttgaaactctgtctgaagataatacagattcctttgccatacaggactcccatacctttggtgcgattactccttcaccaacacccttctcatccactcccagaagtgttcccattgactcttccagctttaccctgcaattatccagcttgtctgcatctcggattaactttgcatgaagcagggttctctcgtccgtaattccttccagtttgaaatcactgtgcttctcaatcgcagtacagatcagactgtcaaacctgtcatccttcacaaatctgcggatcattttctccggtccgaacagaagctgtgcaccatatgctgcatgctccatagttcccggttcaaagctgtcaaatcgtttaatctgttcaaatcttccaatatcatggagcaatccgattaccttcgccagctgtacatcttcctcacccagccccatacggcgggcaatgtcctctgctgcatcaaccactccataagtatgcacgattttcagatgaatcttatcatccgctctgtcatattcatccagatatgcttcaaaagcagctttcgctgcatcaaagtctcttgttaagtctaataatttatccattattattataatcccttctttattcctgttcggactactttatattttctcaaccattattttctgcttccatacaccttttctcacaatcataagatatacctgaaacgatatggaatcacagtcataaatgaaaggttcttctctgtagatcagagtctgaacattctctgcttccaattcttcttttcttcgttcagctttttccatcaattcatgtagatatttattctgttttctgccaaaatctctgtccggatagaccgatgctgcttccctgattttttctcccagcagagtaatcaccggtaaatgactgctcctgcaaagcattccggctatctttttggcatttgatatatccggatttttttcataacgcctgagtatttttcccagtttttcatctcctgcttccgttgccagttcctgcataactgccagtgcttccaccgttacctcccatgggttgtccaccggaacaatatacttctccggtactgccggataaaaaagatagtttaacggcgggaaatcacgcagcattgccagctttccttcatactcagtgcaatatttttctcccagatactcatatttatcacgcaatatggcaatctgatactccattaccctgagattttcatagcccttcacccagaaatgtcccagctctccataattatacaactgtgtttccagcaaaatatcttcaaagaatacagtaaacacattctgcccctgatgaaccaccagaatatactctgcctcacataaatccctgtccgctttctctacagagccctcaaactctccttcataatccctgatataatttcccgtcatcctggcatttttcagaaccagaaaactctccaccgcatcattcatcagatagatcagacgtagctctccactctccgtctgtccggtaaaaccatccggaatatccacaaactcacacagttcctgctccagaagcagatttaatttttcaaaattgtcttccatatattaccttcccgcagaattatttttttcttcgaaaactcctgctttatttccaggtaactcttccatcttttatgttcatagtaaaactttatcacaacaaagtctgatgtctatacaaaaatttagctgattattgtatggctgtcaatcccctggatttttttgaattactggtagtaaaaaatactctgagaaataataacggggctgattgtcctttacggagaacatcttaccgattatctatacgaaaaaagaaaagcaggaataggaagctcttgtaagctaacccattcccactctctgtctattccttcgtcatttgtattattaccagaagtttcctgatacttccaatcactttatatatgtccataatgattttcagacagtcattcttataatatttttcttctcccatggaaacaataccgctttcacatatattctatatttagcgcttgaaagtaccaggaattaataatttttcacgtacaaaatctttaaaatcgtttctttgtttccattctttgattatatcatgtctcttttagatatagtgttaaagtacatgaacaactatatttcgctacatatttgacacagaatatttattttttaatatatttatctttccagaaactgcacaccagtttggtgcacagcctctgtttgaaatttactttacagttactgtaattgctttatacacgccattttgtgcatatacccatacagtacagcttccttttcctgttgctttgatcataccgcttgatgttactgttgctacatttgtattgctgctttcatagcagagttttctgtgatgtttgatcttcttgtctttctttacttctactgctgtaatctgagctgttttgcctttctttaagattacttctgtggcattcttcttgtttccaatctttgtaatagaaactgtttttgctactccatagtttccacctttagttacagcatgtatggatacagaagcatctgtaatcactttctttccatccaccaatttgtatgcttttactatgtatttatagtaagttgcttttttcagtttagtgtgcgtccatgttctggtctttccatttgttattgtagcaagttttttatatttataaacttttccattaccattacaacggctgccataaacgatatatccgtctgctccactgattcttgtccattctacctttatagaattattagactgagttacagaacgtgctttcagatttccatatcctgttattgtatttatagttggttcgttcgaaagctttactgtaatagttactgattcactgaatttaccattttctgtcgttgctgtgatagtagcttcaccattgcccactgccgtcacttttccttcagcatctacagtagcaaccttctcatcactggatttccagatcagcttatcatatgcattatctggttctacctttgctgtaatctgcagactgtcaccaatctttgtaagcattttattttctgttgtaagtgtcagtttctcaggtgcaatctttactatgatagttgctgttgcgctgtgttttccatctgctgatgttgctgtgatggttgctgttccgttggcaactgctgttactttaccatctttatctactgttgcaaccttctcgtcactggatttccatgtgattgtcttgttgtctgcataagacggtttcactgttgctgtaagctgtaaagtttcagcggcttttgtcagatctgctttatcctgtgataaaattacatctgtcacaggatagctcggtgtacttggatagcttggagatggagcactggcttttacatctacgtatgctactgcataaatggagaatttgctggttttaaaactcagagtatttccattacgtgttgcatccaaacactctgccttatcatcatgaatacgaattacataaaattttctattaaatccagccggaatattcttcgcttcttctgaaagttcccgttcaaagataatttcctgatgtgcatctgaaatcggctttgcttcactaaccttttttttgagctcaaccttcttaaacatagatatatcaaaacaatctattattccataagttggatttccagacatatttgcaatgatagtatccagttctgcttgtattttaaatttttcttttgaatattttttttcgttaatatcaataccttttatcggaaaagatatcttaatatccatatttgtatttggatcattatacttaattttttcttgagaagacagaatatcttctatattaattttatccagccctatacctgttatattaggtgcacctggctcaacaataacttctgtagaagaatgatttcctttttcatctgtttttaatgtatttattggaattatctttctacaggtaaattctttaccattcattgttacagttgcatcaaaatagagaactcttatctttccatcggtactatttactgacatcggcaccacatcgcattttctcactatcgtatgatattcatcatttgtatactgaaaaatagcgtttacatcgtattgtcctacttcaacagtaccattcgcatctatttttgtttcttcgcgtgtattccacacaaattgtggattcttgctaagatcaatttcagtcttttctaccagactatctttggcataaattaaatcatctaaattgtttgcaagttcgtctacatcataaccgtcattacaactatccaaaaacttttttaccttagtcaaagctgtcatcaaagattcccagctacctttttcataaatagcttcatctagatttaagcattccttgtacaattttttcaaatcatctaaagttgtatcatttacagtaatctttactgctcctgctccctgagcaaaaaccatgtaaagcccctcatccaagtaacgatgatgcccatatggactcatcatactcgaactgttcattgtataatatccgttaatatttgctgctacaaatttatagtccccttcataattatcatcaggaaggaaagaaatcttataatatccttttttcgtaatattaaaacctacataattcattcctctgaatgttttgcttttatcaaaaaaaaccgttccccccacatttgaaggaggtgcaaaaagttcatcatatgaactgactgttaaagttccagcatctctatattcattacttatctccggaatacgacattttacttgatactttccagattctaaattttcaacagaagtatgtttattatcaaataagacttgaatacttaaattatctgtattatcattttcgtcatctgtattatcattttcgtctggtgtaagtgatataacatatgtttctccatttacttcatattctacttcaaaatacaaatcttctaactcatttgttaagcagcttaccccctgaagaatctgttggctattttgctttaatttaatgcttttcaattgaatattatttgtaacaagttccaccgaagctgcatccccaaaataccccagatacattttagatccagcacttaaagtaactgttttatcagcataagctttatctgaatacctatctatccataatttccggtaagtccatgcactttcattaacagttgctgtaagtaatgtagtatcagcatcttttgtatgacccacaaagccaagatggaatgtctgtgatatatctaacctattctctatataaaaatatcttacatcatcatttcctgaaaatgtatatgtttgagaaggagcttcactattagataatccacctatttcattttctgaatctgttacatgcgctacatttaagtcgatatagtactcgttttcatattcatcttcatcaaaacttaatcctattttatactgtttatcatttgcctcaggttcaaaagaagtaatatgcagatttccatattcctcatagccttctattgcatcgccaagctttattattctcgaagtattatccactaagtcaacttcaaactctgcattttttaagcatttttccaaatctccattatccatggattctaaaaattcatcatacagaattggaggttcctgtgtatttttcagacttatatgagaaatttcagttttctcaggtgcttttgaagttatagtctgccgaagcgaaaaatccaacggctgtttttctgcaaaaattgcataataagttcctgcctgtaactcaaatgctccagctttctcccaacattttgtttcccaagattcagtagcagaattccagcttttaaaataaagaatatcgctaaaatttctataatatgtagttgtttcccttacatcaattttaaatccataattataattatatggatgatcattatcataattttttatatatttttccctgttaagaagaatttcaaaagtatctccttcttcgtctacagtaacagtattatctgcaaaaaattcatcaaatgattttacagtgacaccataacctatactcttaatatctggatctgccttgcagaaaaaatgatacttatattgacctgaaacagttggacgcagaggccttgtatttccagagctttcatcccacaaaaattctccattagaattttcatatacaataccaacttctccatatccatcaatatatccgctatttgtcttcaattcagtttcattttcatcatccaatattaccgtaactggtaaatcagaaggaaactcattatcaatgacagtttctgttaagcatgtataatctgaaggtaatttctgttcatcaacagaaatttcttttattgaaggaacttcttttatcgtaatttttacatcaccatctatgccagcaatatatgtttgataagaagattccaaactcgtttttaatgtacaatagccactatatgactctactccgctagtaggtgaaatctttatattaacaaaagcattatccttattcgttgatatacaataagtagcttctttttttggttgaaaaataaatgcttcattcgcatttacggtaaattctccctcaccagtaattatttgtgcttcatcagatgatttttcattaccatcagattcatcccctgctgaaaatacctctacagaatcttccattgtaaaagtatcctcctcttcacccccagatactatcggctgagtatctgcttcttcctgctgcagtgaatcagtcttatctgcagccatttcaacagattctatattctcactgctatctgaaaataaatctgctgattctgacgcccatgtcatattcaccggaataactgctatagtcgcagctaaagtccacgccagaactttccttaactttttccttgccatatgtttttcctctccttaatagtattttgttactacaactgcttatcaaaaatatatcatatctcacgtttcaatataacactttcacataaacacccatatttcactacatatttaaccatttttttccaatcttcctcacagacaaattgcatcccgttattttttatagtatgattattggaaatacagttcattttatccatctggcatatccgacagatattgtcactgacataagaaactacaaccactttaatccaaaggagcttaatccaattttgaaacttgcaatctgcgaagacaatccttcacattatgaaataatacatactattctgcaaaagtatcctccgggagcttttgaaataacgcatttcacatccggtgatgaatttctccgggctgttgctgaaaatggatgcccttatcccattgtactgacggatattgatcttggttctaacactgtaaatggcatctcacttgcagaaaagatcaaccatatcaatccggacactcagattatttttatcagccagtatctgcaatatgctactgcagtatatgagacggaacatgcctacttcatccataaacaacagatggaaaaatatcttcctctggctctgaggacagcatgccagaagctcgagaaactgcatacacggtatctgtatttctccggaaattcacgcaattatcaggtgctctgctccgatattctttatctggaacggaatctgaggcagaccaccatctataccagaacaggaacatatacaacaaaagaaaaactgacagttcttaccgaaagaatgaaacctgatttctgtctctgtcataacagctttgccgttaatcttcatgctgtacgtacttacagtcataaaggcattatactttctgataatacagagattcctgtcagcagatcttattaccagcagtttaaggacgcatttgccttcatgatgcttgccggtcacagggaagtgcagtaaatgagcagtcatatgatcaatctattcttgtgtattctatccagcctttatctgtgttttggactgctttacttttgctgcaggatcctgccaagcaaacacaagatctcactcccgctgtttttgtgtctgtcagtatttatggcactgttattttggatcaaacgtgaatcacagcataatggaattacaatcgtatttcagcttacaacatttcttgtaacactttttttattccaggcatcttttatgaaaaaattagctgtttattttattttccagctgctgataatctgtccggaaattttatgtaccagtgttttcatagcacttcataatctttttataccgacccatatctatactccgcacaatctgatatccagctgttcacctgtagaatatttcgtcattgaactctccaacatcctgcttggcctgtttcttctctggaaaatatcagaaatcctgcggcagtgtatagattatttgaaaatactcacctttttacaactgttactgccactgatcgctccggtttttctcagtgttataatttcccttcagaaaaagcccgtagcagttctggctctgagcatcatttactggatcatatgcatcggcagttatctgttgtttctgcgtgcagtccgttctttagcacaacagcacagggaatatttacagaaaaaaatggaaattgagttaatgaaaaagcagatgaatgattccgttcagttaagtaatgaatatgccagtctccggaaatggaatcacgatattgagaatcacatcatgtctgtcatatatttgatggatatgaaaaaatataaggaagcagaaacatataccgcttctgttctatcccggcttaattacagaccacaggaaaaacaaccagaggaggattgcagtcatgaaaaagaacattaaattgattcctttatttcttttcctctttgtattccagttgttatattttctgtctacgatttatacagaaaaaattgatcatatgtttctgatcctggcaatgtttatgatccttatctgtattcttttatactgcgtgctttctgatgtgttaaagaaatccaatactgaaatggaactggcttttcttcaaaagcagaaacaattaaaacaggaacaggattacagtcttcagatccgcagacaggatactcaggatttccaggccaaaactgcacaggattttcagaacttccagtcactcctggagcagggaaaacatgagcaggccgacactgccatcaaaaatctgaaccagacttttcagaaggatcgttttcatccttactgtcagaataacctgttgcaggcaatcctggaagggaaacggctccgtgccaaacaggaacatatccaggtgtcctatgaaatccttttaccggaaaagatttccattgatacaactgacctgagcagtatattttttaatcttctggacaatgctatcgaagcttgtaacgcttccggcaatcctgagcctgaaatccggctgtctgcaaacatttccaacggatttcttaccatatatatgcacaataccaagaacccgttacagagttttacacataagactacgaaatcagaaccgggttctcatggatatgggctttctattattgaagatatctgccagaggtataatggctcctatcagtggatcgaccataacgatacttttgattccattgttttactacaagttaaaaatctctgaataaaaggaggcgccttccatgccagttactcccccaattgaagtagatgacactctcaaagaacgaagctctcacggctcttttgagcttccaatagaaacctatacagacaactgcgagatcttccattctctctataaccactggcatgatgagatggaactgatctatattgaatccggcagtggtctggtacgcctgaataaagaaatcctccgtgtcaaggctggtgatctgatcattgtaaaccgcggagttctccatggcataaaaacagatctgaagaatatcctttatttcaggagtattgtttttgacctgaatttcctgtccggtccggcaggagatttatgtcaggaacgtgtcatttccctgctgatggaaaatcaggcggaatttacccatattatttccagatctgatgacaattacgggaatatctgcctgctttttgacaagatccattcctgccataaagaaaaaaagccatattatttcgtaaaattaaaggctctgttcttcagctttttctacgaaatgctcatgggaaattacatcactcccgcagataaggaagagaacaagagtcttgcttctattaaaaaaatcctggactacatcaaccttaattattcacagtcactgaccgctgcagagcttactgcactctccaattacagtgaatactactttatgaaactgtttaagcaatataccggaaagaccctgatcgcctatatcaacgacctgcgcatcgagaaagccaagcctctgcttctgcactccgattcctctgtcacagagatcgcactggaagtaggcttcaacaacaccagctacttcattaagaaattccagcaggcaaccggaatatctcctcacaagtttcgcagaaacctgtcataaaatcgcaattttgttgtatttttttaaattgactgctgatatagttatagatgtcagcaagagaacttctcttcctgatataaaccagaaaacaatacactattcaaaactaaaaaataagcaatctaactcataaaaaaacacatattcatttcagaaagggagattacgatggaaaatttagaaaagctcatctatgacctgtataagaaaaacgcgcgtcagtgtacaaacgaagaaatttacaatgcattattgatttataccaaaaaccagctcttcgaaagaggctatcaggatggaaagaagaaaatctattacatttccgcagaattcctgatcggtaaattattatccaacaacctgatcaacctgggaatctatgatgatgttgctgcattcttaaaagagaacggcaaagctatcgctgatatcgaagaagtagaaccggaaccatctcttggaaacggtggtcttggacgtctggcagcatgcttcctggattccatcgcaactctgggacttccgggcgaaggtattggtctgaactatcacctcggactgttcaaacagctctttgagaacagacttcagaaagaaactccgaacccatggatcgaagaacacagctggctcacacctgcaggtgtttcctatactgtaccgttccgcggattctcactgaaatcttccctgtacgatatcgatgttgcaggctacaataacaaatccattcatctgcacttatttgacattgatctggcagatgaatccatggttcacgatggaatttcctttaacaaaaaggacatccttcacaacctgacactgttcctgtatccggatgacagcgatgatgacggacgtaagctccgtatcttccagcagtacttcatggtatccaatgctgcacagttcatccttgacgaggcaacaaagaaaggctgcaacctgcatgaccttgcagactacgcagtgatccagatcaacgatactcacccaagtatggtcattccggaactgatccgtctcctgacaaaacgtggaatcgcctttgatgaagctgctgaaatcgtatccaaagtatgtgcttacacaaaccataccatccttgcagaagctctggaaaaatggccaatggactaccttcttgatgtagttcctcaccttgtaccaatcatcgaaaagctggatgaaaagatcaaagcaaaatatcctcaggaaaatgtagccatcatcgacaagaacaacctggttcacatggcacatatggatatccactatggattctccatcaacggtgttgctgccctgcatacagaaatcctgaaaacaagtgagctgaaagctttctatgatatttatccggagaaattcaacaacaaaactaacggtatcacattccgccgctggttaatgcactgcaatcatccgctgacagactatattacctctctgatcggtgatgagtttaaaacaaatgcaactgctctggaaaatctcctgaaatataaggatgatgaggcagttttgaacaagcttcttgagatcaaaacagaagctaagaaaacctgtaaagaatttatcctctctaacacaggtgttgaaattaatgagaacagcatctatgatatccagatcaaacgtctccatgagtacaaacgccagcagttaaatgctctgtacatcatcagcaaatatctggagattaagggtggaaagaaacctgctcagcctgtaacctttatcttcggtgcaaaagcagctcctgcttatgtgattgcaaaggatatcattcatcttctgctcacactccaggatctcatcaaagatgatccggaagttgcaccatacatgaagcttgttatggttgagaactacaatgtatccgcagccgaaaaattattccctgcatgcgatatttctgagcagatctccctggcttccaaagaagcaagtggtacaggtaacatgaagttcatgctgaacggtgccgttactctgggaactatggatggcgctaatgttgagatcagcgaactggttggtgaagataacatctatatcttcggtgaatccagtgagaaagttatcgaacattacgagaaagctgactactgctccagagatatttatgaaaatgacaaacgcatcaaggaatgtgttgacttcattgtaagtgaaaagatgctggcacttggccacaaagaaaatctcgaaagactgcaccacgaactggtaagcaaagactggttcatgacactgcttgacttcaacgattatgttgagaagaaagatcaggcactggctgattacgcagacagaaaaacatgggcaaagaagatgctggttaatattgcaaaagccggattcttctcttctgacagaactatcgaacagtacaacaacgatatctggcacctgacaccggcaaaataatccaataaaatttgtgatcatataaattctgtaaaaaacaaacagcaggcattgtatattcgatggaatatacagatgtctgctgttttatgtttatcagatcataaaatcataaaaatctcccactgtattagttcaaatcagactataactacggcaaccgaatccgagcaaaatataccgctttatatatccttgtaataagcaggagagataacatccgcctccttacaggaacatccgttctcgtaactgtcgcagcagtcacagtttgaacagtacatatgagtatccggaatataaaacaagcctccatagagcggtgaagtacggagttcttttgactctttcttgctgttggcaaaatggattccattagagatcagcatattttcaggttcatactgagagaaatcaaaataatgtccctgtgttccatgatggggcaccttgatacaccagtaatgttcgtataatggcaattttccatcatagttctctgcgatcattttcagatgctcaggctgtgcatccccggtaaacaaaagatttaattctccgtctctggcattctggaacacaatactgatcttatgcttaaactgccgcagatttatctgattctcattcagccatgccagcagtttcttaaaatcaggaagtgctttgattctgcgaaattcacgctcatacacatatgcccggataattttctgacggacctccggctgttctgtcagctcagatgctgttaaatctgtttctttttccatagtttccgccggtttattgccttcagcagtcatagaccatacgatcagtctcagtttctctgcaaattcaagcaggacatccattacttctttaaatttcccgtcttcacagattctgttatagacttcgtccgtctccttccggatcacatctgtatccggccagagtgcctgatatttgttttcaaaaagttttccccggcttaacagttccacgttctgtttgttctccagaagtgcatccaccagtgcaaacaggctgacctgacggcttggcaatccggattcttttaacaaatctgccagaagcagcagcaccagtgttctgctcatttctttttttgaaaaaacatcgggaagataaattttcccaaagtcaacagaaatatcttttttcttcatcatataaagaagccctgacagatgatccatatgaaaatgtgtcagaagcagatttttactcttgatcgtagacagatctgagatgatcacatcaaatatttctcttctggggcgcccctctatcctgctgttatttgttccgaaatctaccagcagactcttctttctgtcccggagacagaagcagtctccgaaacctacattatacattcgtaccttcattcttttccctcttgtttacaatggttggttttattttaatatagggaaattggaaatgcaagagggtgttgtttgtgttattatagtgtcgtatgattactggttactgttcacatatcactattccgcgaggtgttttagcataaatatgccaaaatcccgagacatacaagccaaaatcccattgccgcaggcaatctggaatgaattttggctgcgttactgagaacagagtaaacagtaactcatctgaaataaaagagcgtgtttgaaaaatgtttttcgcaagatgtgtgtcatgatttgtgagaatgatttttcaaatacacctgaggaaaaacaaatataaaatatcagcagaatggagatagaacacttatgacaaaacaggaactggctctcgaggtcattgaacggttaaaaaaggaatatccggatgcggactgcactctggattatgataatgcatggaaattactggtaagtgtgcgtctggctgcacaatgtacagatgcaagagtaaatgtagttgtacaggatctgtatgcaaagtttcctactgtagaagctcttgcaaatgcagatgttgcagatatcgaagcaatcgttcgtccatgtggtctgggtaagagtaaggcaagagatatcagtgcctgtatgaaaatcctccacgaacagtatcatgacaatgttcccggggattttgatgctctgctaaagcttcccggagtcggaagaaagagtgccaatctgatcatgggagatgtattcggcaaaccggcgatcgtgacagatacccattgcatccgtctctccaaccgcatcggtctggtcgataatatgaaagaacctaagaaagtagaaatggctttatggaagatcattccgcccgaagaaggcaatgatctctgtcaccgcctggtcaatcatggccgcgatgtctgtacagcacgcactaaaccttactgtgacaggtgttgtctgaatgatatctgtgaaaaaaatggtgtagacagttaatcctccaggctggcgaagaagagttcatagaagtcgtcttccccagcaagcttcggagagttttccccgccaccgttggtacttcttcgcatggtggcataaaattcttctccggctgtgatcagatccatctcataaatctgatatcccagttcccgacacttcgcacagaaagcggcaagcggctgttctgcctttctggtgtccatcagttcctgccagatgttacggtctttcagtgctttttctcttaattcgtctaacattgctccgatttccataataacattcctcctctttgttttctgaccttcatcaaataactattccatcgttatctgctgaattgttacttcatcagttcataataaaatatatactgctgcatcacgccccggcagcccttataacgtctgtttggaaatccccgtttataatgggcatccaacgcctggcggatgtgagtatctacaggaaatgcatccagctgatgcaatccgaaaagacagatacagtcagctactttctcaccaactccatatagtcccagcagttcttttcgtgcagctttataagtcatatcatacagactgttaagtgaaatatctccgaaacagacttttctggctgtgtccagcacatattttgctctgtatcccagattacactcccgaagctgttcctccgttgccaaagccagtgcctctgcagtcggaaacgcataatattctgcacctgtgctgcttgtttttcttactccaaattcccggctgatattttcaatacacttctttattcttgtaatattattctgttgagagatcaggaatgaaataatcatctcccacagatcctgctgcagaatgcggattccgcttcccatctctcctgctactgtcagatatttatcccttggattgatcatgtttatatattcactgtaatcacaatccagatcaaaataccggatccagaagaaaatgaaatcttcttccggacaaaagaaattgacaattcctctctcctgagtcagttccagatatttatctcccgcaatcacccggtaacggtcatcaccgatctgatccatccgaaagcactgcccggatctgcagatctgccccaggtcaaaattatccatttctattgtcagcatactatataaccccttatccttctgttaccaatgttactaataactcttttttttcttgatgaatatatgaatgtattatatactattctaagtataaacgtaaagcagaaaggggttcttaccaatgaaatttatatatcctgcggttttccgcaaaaatgaagaaggcagatataaagcattttttccggatcttgcctgttgtgaagctgaaggcgacactctcgacgatgcgatcgataatgcaaacgaggctgcttataactggatttatgcagaagtaatggaagatgaaatggagctccctgcaatttccgatgaatccgatctggatctgctggagggagatattgtaagaaatattcaagtcaacatccgtatgtatgacggatgggatgagtaaccactacccgcaacgacaaattacagaaattcagctccgttatgttacaataaatcaaacattaacggagcttttttattatttaaatctgctcagacgcacttcggtgtactatctgcaaaacgatttttttctctcgttttgcacttcaaaaaaggaggttttactatgaacgcaaaaaagttcaaaaagttctttgtgagtattgcactcagtgctgttctcacgttatcgtccgcttcctctgtattcgcagccacagcacagctggtacccgctgaacaaactgcggaactggctcaaagtgacgattctgatgcccctgccattgaatcatctgatgcacagaatgcctgcgcttctcttaccgcccagccagggatcagccagacagcagcttccgagaattctgtaactattcagtggaaccctgttaccaatacttccaaatatgctgtcaatatcagccctttaagttcctcttcttatcgttttctcggctatattggcaatacccacaataaagctaagatcaataagctaaaagccggaactgcttacgttattaaaatcacagcactgaattcatccggcattgcgatttcttcccgtactgtgggatgtaccacgctttattcaaaggtaaagattaaatcttcctatgcatcaaccggcagatataccttcaatatgcagactgtaaacccttcaaactccattacaggttataaggttgtataccagagttctgcagcccacaaacttataactaaatattttaataccagatattcctttaccattccaatatccggcaatacattttatcaggtgaagatttacccttacctggttctgggaaataaacggtatgtaagttcaacctctacggacagatatatttccaatgtcatcactcttcagaaagcaggcaacacaaacagctccatgagcgtaaaatggaacagaactgccggtgcagacaattacagtatttacataaaatatccgggaagcagttctttcaaaaaagtaaaaacaacaacttccaatttctttacactcaccggaatgaaaaagaataccaagtacggcattaaggtaattgccaataaaaaagtgaaaaacaaagtatggcattctgattccaaagcctataatatgtccttagtctgaccatagttatccatagcaattgcataaatccggctacgttatcaatgacgtagccaaaattttatattgactttcccatatctaagtgatacactgattgtaattgagacaaggggtgcttgtgtaaacaggctgagagtaagctgtattgctttaacccattacctgatttggataatgccaacgtagggaaagttatagttcttccacactgcaatatgcttgttggcgtattgcagttttccttttactctgaacggacatatcatattatctcccccctgttttaattgcggacaaatagtcaggcaaatgatttcacacgcctgaaaggcaataaatattgccacgacagaccgggggcaccactctctgtcacaccagtagtttacttaaaaacttacgaatatgcgcaggtgcaagtccctgctgtatgcaggaggcgcagttcatttaatattgctgtttatctattactatgtgcagcaattaagagcccacagtgcagggcaaggaggaaaaaaatgacacagtatacaacgcagatggacgcggcacgtcagggaatcatcacaccacagatggaaatcgtagcagaaaaagaacactttgacgtggaagaattaagagaactgattgcaaaaggacaggtaattattccctgcaacaaaaatcacaagagcatcagtccgagcggtgtcggtgcaaagctgaccaccaagatcaatgtaaatttaggtgtttccagagactggaaagacgttgatatggaatatgaaaaggtacattcagcagtagaaatgggtgcagaagccatcatggatctcagctcctacggagataccagaagcttccgccgcaaacttacatccgaatgtccggcaatgatcggtactgttccgatctacgacgcagtagtatattatcacaaagcgcttggcaagattacttctgaagagtggattgatatcgtacgtatgcatgcagaagacggcgtggattttatgactatccactgcggtatgaatcgtgcaaccgcagcacgtttcaaacagaataaacgtctcatgaacattgtttccagaggtggttctattatgttcgcatggatggaaatgacaggaaaagagaacccgttctatgaacattttgatgaaattcttgatatctgcagagagtatgatatcactttaagtctgggagatgcatgtcgtcccggatgtattgcagatgcaactgatactgcacagattgaagagctgatcactctcggtgagcttaccaaacgtgcatgggaaaaggatgttcaggttatgatcgagggacctggccacatgccgctgaaccagatcgcagctaatatggagatccagaaaactctttgccatggcgctcctttctatgtacttggaccgcttgtaacagatgttgctcccggatatgaccacattacttccgcaatcggcggtgcgatcgctgcttattcaggtgctgctttcctctgctatgtaacacctgcagaacatcttcgtctgccaaatgcagctgatgtaaaagagggaattatcgctgccaaaattgctgctcatgctgctgatattgccaaaggagttcccggtgccgcagaatgggattataagatgagcgaagcgagaaaacgtcttgactgggaagaaatgttcaaactcagcatggatcctgagaaagcaagacgctaccgcgcagaggccaaacctgagaaagaagacacctgcagtatgtgcggaaacttctgtgccgtaaagaatacaaaccgtattctggatggtgaaattgttactatttttgatgaatgatgcttttataaaagccgtatttcaacatgtttgattgttgaaatacggctttttatttactatatcttcatcatatctgacataatacatccaccggctgaaccatgttccataatctcatttaactgtcctgttcccggatgtatccctcctatggcatatacaggaatctttactgctttacagacattctccagaaattccagtcctctgggtggaagtccttttttacagtcagttgtataaatatgtcctgccgtaagataatcagctcccagactttccgctttcaatgcatcttctacggagtggaccgaacttccgatctgccggaaacctccaagctttccctcatatttttccaacagaaatattggcagatgaatgtatggatgatgcagtttttctgctacgtttacataggtatgtaatatgcagggaacctgatatctcttacagatttccagtatctgctctgccagacgagaatattcttcctccggcagatccttttccctcagaataaccgccttcggatgaaggctgcatacacgctcgatctgttctgcaaagggacgctgacacagggagcgattggtcactgcaattacatttttataaggatttttctgcattttagaggtacacataatcattcataaccggctgaagatcatgatccaaaagtgccttatagacttcatctacagaccttccgtctgaaatctcaaactggtcatctcctttatcttcgatatcctccacatgacttccgattcctgtgctgactcctgctgaaatctttgtcgcagcaattccaaccaggttgtcgcggacacgctcacactctctggtagataccgtaatacttgcaaatggcatgaacagacgataggcgcagaccacctgaagcagctgtggttcatgtacatccataggattaatacggtcattgttgatgatcggccgaagtctcggacaggaaaatgcaatctctgcatgaggatattttctctgcaaaagatatgcatgatatccggtggcaaaagcatccttacggaaatcatccagtcccagaagtgcagcaaatcctactcctcgcataccaccctttaaagcacgttcctgtgcgttcagacgataaggaaatatacgcttgtgccctgcaagatgcagagtttcatacttatctgaattataagtctcctggaataccgttacataatcagctccgcattcatggagatgtgcatactcatctgaattcataggataaacttcaagtccgattactttgaaatatttccgggcaatcttacatgcttctccgatatattttacatcagattttgctctgctctctcctgtaagaatcaggatttcctgcagtcctgtctttgcgatagcagccatttccttatcaatctcttctgcattcagctttgctctgcggatcttattatggcagttaaatccgcagtaaatacagtaattctcacagtaatttgcaatataaataggggtaaacatatacacactgttcccaaaatgtttcctggtttctttctgcgcagcctgtgcgatttcctccagaagaggcaatgcagccggagacagcagtgcctgaaaatcctctggtgtacggttatcatgagcaagtgccctgcgtacatctgcctctgtatatttatcataatcgtaagcattcatggcagaaataacctgatccatcacgtctgattcttccagtacttccattcccggaagatatttcatatgatcgatcctgttctttttcatatcttccagaatcacttcattgacaatactttcgttgaagtgttccccatgttccatatttttttctgttgtttccattgatgttttctcctctttattaccatttggcaactttcgttttcctataaattaatacctactccgcagttatagcaatcctctaaaataatgcatcttaatccagcccatcagagtgtgaaatcctgcgtcagatatctttgccgtgcgtcagcacgcctgcagatatcttccttgtctttcgcacgctgctgaactgtcttaaatgcattatttacgaggattgctataatcaaaaatctcattttagaatgattttttatttattactcatgaagaaaaccagtcagtggagaggatgcgcttgcacctttttccagggttcttcccagtccggcaaggtatgcacttcgtcctgcttcaatagcttttttaaatgcttcagccattatctgcacatcacctgctgtggcaatcgcagtatttgccataactgcagatgcccccatctccatggcttcacacgcctgagaaggacgtccgattcctgcatctacaatgatcgggagctcaatttcgtcaatcaaaatctggataaattccttggtgcacagacctttattagagccgatcggagaacccagcggcatgatgcaggcagctccggcatttaccagatctctggctgcattcagatccgggtacatataaggcattactacaaatccttcttttgcaagaatttctgtagctttaacagtttcatagttatccggaagcagatattttgaatcatggatcacttcgatctttacgaaatcaccgcatccgatttctctggaaagtctggcaatacgaactgcttcttctgcatttctggcacctgaagtattgggaagaagagtaacatttttcggaatatagtccagaatatttgccagtccaccttcattggcacgacgcagagccagagtgatgatctgcgcatctgccttttcaatacatgctttcaccagatccagagaaaattttccggatcccagaataaaacgggaagtaaattcatgacctcccagaatcagtttgtcttcattatttgtactcataatttaagtccttctttcgtatattataatgtgatatcaggatattcctgtttatcttccacctcccatgaagctgactatttccagtatgtcattttcatgtaaaacagtagtgctgtactcggcttttgacagaattctttcatttaattctactgcgatctggctgggcacatagctgttttcctccagatattgccctattgtaagagtattctgcaattcttttgtttttccattaacagtaataagcatactttctcctttccgggaaaagaaggtccggcctctacaacataaaaaagagtccacaaaagaatacacccgcggtggtgcaccccttcatgaactctgttcactctcatctttcccaatattcatctgttataatgtaaatttccctgtaagcccccggctttctctcgcttattacagattgattaccggacagctgaatttcttcaaatgcatgagataaataaaaaggagatgccagtcatctccctttaaaatcatatcttataggttcctacgttggcattatccaaatcaggtatatgggtcgaagttgatgacttcctctcagcctgcgctcacaagctcccctttctttacatggataaagtataatcttttatcccatgtgtgtcaagaccatatttctacatcctcagtttcttatgaaactcccgcatcgtatccttcttgcagaagataaacagtgcagccaatgtcagaaaactgattccggcacagattactgaaggtacggcaaactgcacgattccagtccaaaccaatatcatcggaatcagtcctgcaattccggcctgtacaagataaaacagatattcttccctttccagacggtttatttttgcgatcacaggaacagaaaactgcactgccaatatcccgaaaggaatcacaaaatccacagaccagcccttccatccggtaaaccggtcccataggattgcgattactgatatgagcaaaagctgccacatttcattcttcagaatattcctgcgtttataatatgctaccataacaaccagccatgcacaggcacatcctgctcctgcaaaccagaaccagttcagtacacctgccatcataaaattaatcattccgcaaattaccgcaattgccagacacaggaagctgaaagtctggataaccttctgattttcttttttctcaagcctgtgcttttccccatatcccggaaattcattctttaattctctgtgggaaacattctcctcgccaagcatccgctggaaattcctctggatactgtcatccggtatcttggaagtaaatcccagtaccatctcatccccataagaacaggaacacatctgcaaagaattggtacttgcaaaaatcccaaaatgctgaatatattctttgtactcctccggcaaacggataatgccgatattagaataaactgccgtaatgctcctgcttcccagattggctccgatcataagaaaatatttcttgatttccaacggaacagcacgtacaaaaggattcttctcaatgcgcacatatccgctcatatgcatggcaatcttttcttttaccagttcttcttcgaactgtttctttacagacaaaagtacatcttcaaaagttgtttcatcagaaaatatatatcccacctcaatccacccaaagaaatttgtcatagactgagacggaaaataatttctcagattcaccggaatcatcaatgctaccggtcgtttctgctgattctttggaatctcttcccgaatagaacacagcatcattgctgtcagtaaaacagtgatggaaactccacaggagcgggctttccggtggatatcttttacagaaagagcaacctccgtaatatgcatatctgagtgaaccagcttctcccctttcagtttaacagcggcttttttcttctctttatctttcggtatatctgaagaataatactgagaaaagctgtcctcttctttatctccatgtgtaatttcctctgcatgctcaatctgcggaagatctgcctgtggatgtgccaggatcagataatcctgaaccagttcctgcaggaaatgcatggctccagtgccatctgtcaatgcatgaaacacctcaaaattaatcctgtttttgtcataactcacctgaaataaaagggatttcttatccggaatatataaacggctgcatggtggttccgtctccagctttaccactgctctgatatctctgtgctccagataaaaccagaacagcccttttctcagaaccgcctggaacaatggatatttctccattgtctgatccagtgctgcctgaaggatttccccgttaacttcttcctttaactgacaatagaaacgaaacactctggtgtcattctttcctgttaccagcggaaatgccaacgctgcattatccagttttctccattttgagtatcctgtatccataattttcctgctttctttttggttcctgcttacctctttgtcctgtaacaatcttctcagggattactgtagaattttctcataactcttattcagaaaccggttaatatatttaaaactctcctgtacatgcagaaatttgattcccaatgcaaaaaatccatgaaatgctccgtaaatcctgtgtacttccacatgatttcctgcagcatgaagttttctgccatatacttctccctcatcgcgcaaaggatcatattccgctgtgagaattaatgtttcaggcaaatttctcagatccttctccagtatcggtgcaaaatacggattctgcctgtcctctgctgaactctgataaagcttcagataatcttccatttttactgatgtaagaagatagtcactgccgttctcctgcacggatctgtaaggagattcctctgtataacagtttccaagtgctggatagatcagtatctgacggcgtggtgtaaactctcctttgtctcttgccatcagacatactgctgctgtcagatttcctcctgcactgtccccgatgatcgtaattttctccggatcagtgtttaagatcagctgattggtataaagcgctttcgctgctgcataacaatcctccagcggaaccggaaacttatgctccggtgccagtctgtattctacagaaactacaatatgtgcagttgcctgtgccattctggcacatacacgatcgtaattctccacactctcagttacccatccgccaccatggaaaaacaggagaatcggaaatgtatttccctctacgatccccgcctgcattgcctcttctgtcggaaaatacagtctgaccgggacctcatgttctccattatacaccctggcatccagtttttttacaaaaatccgcatggcatccagttgtttcagatctgccattcttctggaagattccagttcaatatttccatatgacagtgcatgcagaattgctttcattgtctttgatatcaatattctatatttcctttcagttccatcattctatccgcatccaccgcttattgcttttcgcaatctccgcagatgtcctgcttaatccagtatattgttttcgaaatactgcttaattaatcgtggcgctcatccgtattactgtacatttcacagaatcttgcggcaaatgccggtggttcatcatgcacatataaatgggaaacatcaccaaatgcactgatacgaaaacttgcaattccttctcttcgttcttctgtattgacagttgtcactgaacttggagctgcgcagaatccatgccacagtaccattggagaagcaccgatcagatgcgcaagaagcacacattccagaccaaaatggcagaagaataccagggtatcttcatttggtttctccactctgtaataatgtccttcacgtacataaccatgttcagcaagaagcttatcaaactctcctgttacatgatcataatatctcttgacatcagattgctgaaatctctcgttttcataccagtgatcatatcggtaaaatctctcatcctgtgtccagtcctgtggaagccagtcccataatctcttctgcctgtcagtaacatccgggcgattgatcaaaacatcaaattcccgtaaccagtcacactcaactgctgtacggttcattttcttcaatgtaaaagaggcagtatcctttgcccttccaagaggcgatacatagaaatcctttacatcaagttttgacagcctttctgacagatattctgcttctttccagcctttttctgtaagagaatcaatggaatagtccggatctccatgtcgcacgatcaataatctcattcgtattgttcctttcttttgtctcagttcttctgtatcagatcagaccgtatccaaatggtctgcctgctgtgactgagggaattatcttctcataaatatttcctgatgtgaataggtaatgcatatcatatgatgtttttattctaacatcaggtttctatttctgcatcaaattttttttgattttaaatttgttataaattttatttgttattatattatgaaattttttttcattttataatgattttatatcccatgtatgctatactgattttatcacaatcctctaaaacaatgcatcttaattcagcccatcagagtatgaaatcctgcgtcaggtgtcttcgctgtacgtcggcatatcttgcagatatcttccctgtccttcataatccgacaagttgtaataattgcattattttatggaattctataaaaagaaaggagccacttatgaaaattttagtcttcgacattggcggtaccgcgatcaaatacggaatctgcaagaacggacatctcgaagaaaccaaagaatacccaaccgaggccttcaggggcggtactcacattttgaatactatctgccgtctttctgaacagtatctcccttttgatgccatcggtatcagtactgccggacaggtcaatcctgatgaaggttctattatttatgccaacagcaacatccctgattacacaggcacacaatttaaaaaaattctccaaaaactctttcatgttcctgttgcagtagaaaacgatgttaacagcgcagctctcggagaagctgttttcggtgcaggaaaaggaaaaaattcttttctctgccttacgtacgggactggtgtcggtggtgccattattgaaaacaaacaggtttaccacggttcttctttctcagccggagaatttggtgccatcattacccatgcagaagaaaaactctccggtacagacccgtttgacggatgctacgaacgatatgcatccgctaccgcactggtaaaaatggtttccactgtagattcatctctcactaatggtcgacagatttttgcaagcctgacacgcccggaaattaacgaggttattaataaatggattgatgaaatcgtacttggtcttgccactttaatccatattttcaatccttcatgcattgttctgggtggaggtatcatggttcagccttacattctggaacgaatccacactcgtattccacaaatggtgatgtccagctttacacatgtacagatttccaacgcaaaactcggaaactctgccgggcttatgggagcctattaccttgcttcgcagaaactttgattttccgaacatgaaaagagcctccaaagcagagattttatatttatggcaatcctgtttaataatacatttaagacagtccagcagggtgcaaaagaccagaaatgtctgccgcagtatttcaccgctctgccgaactgtcctgattgtattattttgtggaattgttataatcgctctactttggaggtttcatatcatccttatctgaccatttccggaacagaaaccattttatagtaatttatggaattgctataaataaaatatccggcagaaaatctgccggactgcatactgctctgtagctttattatgtatttactgtaattctgaaattgcatcacgtatcattttggctgcctcttctacaattggtatatcttcgggaattaaacccggaagaggtttacgtacatttccaatatctatgttttcattgattcgcagaatttccttcattactgcataaagattaccgtatgcttcacacattttataaataattgcgtccgctttgttctgaatttccagagcttctttcatttttccttcttctaaaaactcattcatcttaagaaacaattctggcatgacagcataagttcctccgattcctccatcagctcctattgcccgtccactaataaactgttcatctggtccattaaatacaatatgatcttttcccgcttcggttttaaacatctgaatgtcttgagttgccattgaagaattttttaccccaagaacatttggattttttaacatatttttatataatgacatagtaagtgtagtaccagataactgcggaatattgtaaataataaatggtgtatttggtgctgcagctgaaatatcattccaatattctgcaattgcatactccggaagatgaaaataaatcggtggaatagccgcaattgcatcaactccctggctttccgcatgtgccgccagttcacagctgtccttcgtattattgcatgcaacatgcgcaataattgttagttttccttttactgccttcattacattttccagaattttcttacggtcttctacactctggtaaatacattctcccgaagatccgcccacgtacagcccttttactcccttctccatcaaatgttttgccagaagctgtgtacgttctgcactgatttctccattgtcatcatagcatgcataaaaagcaggaaatactcctttaaatttttctgtattcattttgatttctcctcttttttatttaaaccagaaattctttgtttctgacacttttgggaagctttccttccagaaattcttttatattatccgcaataattacctgagacctatattcactttccagcgaagctgctcccatatgagatgtaatatacacattatccatatgcattaatggctgatctgccttaggtggctcttctgtcaaaacatcaagtcccgcaccggccagctttcctgttttcagtgcttcgatcaaatccgcctcatctattacacctcctctgcaagtattcacaagatacgcatgcggcttcatacgctcaaatagtgacttattgattattcttgcagttgacggcataaacggcatatgaagactcactatatcactccgttcaaagagttcctcaagtgtatcaacaaatgtaatattttgacctggtactgcttcttttacaaatggatcatacgccagaagcttaactgaaaatccagatatcatacgggccagattcttagcaactcttccataacctgcgagtccaactatttttccatccaattcatttccagtaatagttgagggccaaattccttctctacatccttcaacgcaattggtaaaacgtcttcccagattcaaaatgtgcatcatagcaacttctgctactgccggtgcattagctcccggaatatttgccacaggaattccgttttttcctgccgctttcaaatccacggaatctactccagtaccatatttctgaataaactttacttttccctttacagcaccaagagtagtttcattccagggctccatagtagcaattacaatatcaacatcttttactttttttatcagcaattccgggttattatccggaattgcctctgcttcaaaatcgcatccaatttcgtcgaattttttatataaataacttacatcaactttctgtggatcgagattcaaccaaacttttgtcttcatattattcacctacctgatcctgaaaatcttcaattgctgaagtcatactctttaatgctcctgctgaatctgcagtacctgttgctacctgattaacagctttcacaaatggatatgtaaaataatgtttcgctgcaactgtacgtcctttcaatgtttttaccggatatccataataaccggaagcattttctacatattttaaggcctgtgcatttacttcattatctttccaggttgtattttcctttgcatcctcaaatacaggtgcaaatacaggcgcaatctcctccatataagaatcgtaccagtctttgtcaagaaggtaagaaatcacatcagaagccaaatctgtatctttacaggtattcatgactgcaaatccacggttaaaattcatatatacactattgtcgcttcctgccggaggagcaagaacaactgtattatccagtaaatctttatattgttcatcagataccagtgcattgtataatgtaggcgcgttaaagcaaaatgcagtgcgtcctgccagataagatccattatttccacctgcatcccatgtcgttgcatcctgtggaattactttatcatcataaagttctgcatatttatcaaacacagccgttactttatcgtctgctgctacatttccgtcttcatcaaacagatatcctccttcattccacatgtactgtctgattgtgttctcatcgtcatcatcgttttctccgcatccaattgcaagtccataaaaatcattatccggatcactgaccttttccgcatccttaaatacctcatcccaggtcgttggcatttcagtaattcctgcttcttccagtttatcctttctgacgaacatcaatgtggaagagctgtaaaatggtacataataatatttatcatcaatttttgttccttcataactggcttgcagatatggacgttcttcatcaatctgatcaacaagatctgtcacatcattacatggaatattcggataataattcagaacttttgtagtatctgcagaaataatatccggaacgctctgacctgcttcaattgcagcattaagttttgttacaaaatctgttgcagccaccatctcacaatttacagttacatttttctcttttccgtattctttcagcctttcttccatttttgtatttgcatcatcgctgaaaattttctctacccatactgtaatagtttttttattcccggaatctgctgaagcagcctgtgtatccccagatgaggtttcttctactttggaagtatcagtggatttttctgtttctccggaactgctgcctccgcatgctgtaaatgaaagtgccaatgtacctgccattaccattgataataatttttttctcatgtagtagttcctccttttatttatcttttttcgttttttatcaaccttttacaccaccgtcagtcgctccgccaaccagaccgctggatgccagcatatatattacaataatcggaatacctgcaagaacaccgcctgccataagctggttccatggtggcatatcaccataaattaaacctgaaataaccagcgggaatgtctgtacctgacttgatgtcaggtttaccagagcatacatgtattctccccaacacattgcaaaagtaaaaatcgtagtagatataattcccggtaatgccaatggaaatacaatcttatacatcgttcctattctggaacagccatctaccttggccgcttcttccagttcttttggaaccgctgcaatatgtggaatcagaatccaggctacataaggtaaagtaaacgttggataaattacaattaatccccagattgtatttgtaagatgcattttcgataccagcatatataacggaatatataaaactgtagttggcagcaaatacatgaatagcacggactttgaaaaaattcgtcttcccttaaatttcaaccttgataatgtatacgcaacagggtatgctattaaaattgaaaatacagaaacagataccgcaataatcaaactgtttttcatactggacagaaaattaatattatttattaaataagaataggcagcccctgtaggatgatgtggtataagagtcggcacttttgcataaatttcagaatcacttttaaaagatgtattaatcatccagtatattggaaacagtgctacaatcaggcatattatcaaatatactcttccaagtaatgctgttcttttttttgctttcatataattctcctttcattttcctgtacacattcagctgcctgatcattcaccttccggaagcatacgacgtgtaaggatactaataagaatcataagaacaggcattgccagtactgcaaccgcaataccacgtccaagcatcatacttctcatggctgtcttgtaactgtatacgttcataacctctgtcgttccgtttggtccacctccggtcagtaaccatacagtttcaaattcattaatcgtccagattgtactcataagcgctgataagatcgttacatcttttacttctggcaatgtaatgtgcctgaatttctgccataaacctgctccgtcaatttcagcagcttcataataatctttgggaattgtctgcagctttgccagaatcgataccccaaagaatggtgttcctcgccatacgttagctacaataattgtagtcatcgctaatccggcagatccaaaccatataatatctgtatttgtaatatgtaaggattttaaaatataattggcaattccacctgttgaattaaatatccatcgccagttatatacgacaacaatattgggcagtgtccacggaatcatcagtaatgctcttgctatattcctacccttaaatttctgatttaatgataatgccatcaacattcccaatactgtttttaccagaatggaaacagctgtaaaaaacactgtatttaagatagatcttctgtattcggcatctcctaaaagtctgatataatttttaaatccaacaaacgatgccggatttccaatggtcttatttgtaaaactcatatataacccccaaaccattggaaacgccagaaaacatgccagataaataatcataggagcatttacaagataggcaaatctgttttcaccattctctcgatttctattcaaaatagtattcttcctttcctcagtatttttttatatgtaacatctatttttttcttttaatcttcatttttcttcctccctttatttcgctaatatcttgttatgtttcttatttattcatttattatgtaaaatataatatcattagataaaattattttcaatattatttattaatgaaaataatttttattttagttaaatttgcacaatatatttagtatttttataaagtaattatgctttttatttcaaacataataaaattattttcatttatacatgttatgaaaatatcttcttgcacacaattaaatcttgtcttataatatttttcaatacaggaattgccagtttcatccatatttacaaaacaccagagcaattcatgacattatttttacactttgatggaggttttagcatggcagacagtattcttgattccattaccgaacaatatcattctcttaccaaatccggaaaaaaactggcagattatgtattttctcataccacagaaactcaatatctttctattacttccttagcagaaaactgcaaggtatccgaagctaccataacccgtttttgccgcggattaggcctttccggatataatgcttttaaactggctttagcccaggcagaccgtaccaccgatcttggtgattccagtaattccgctgaacccgtatcttctgaagattctatttctactatatgtgcgaaagtgcacgcagccaatcttctttctttaaatgaaagttatgcgctttatgatgaagaagaaatgtctaaggcaatatcaatcctttcgtcttctcgccgtatatattgtttcggtcagggaggaagtatgatcatggcaatggaagcatgggctcgtttttctacagcttctcctaattttgtacatatttgtgattcccacatgcaggccagtgcaattgcaatggctgattcaaaagatgccatccttttcttctcttattcaggttctaccagagatatgtgtgataccttacagatagcttccagtcgccacgttcctgtcattcttattacacattttccaaaatctgccggagctgaatttgcttcagtagtattacagtgcggttataatgaaagtcctctacagtccggttcagttgcagccaaagtcgggcaactgtttttgatagactgcctattttatggatactgcagtcaaaaacctgatacctgttccgcagcccgttctgcaacagctcatgcaattgcaaataaattgctataatgtgttcgaagaaattttatgttatcaaaatgttgcaggttaactctttgtgacacgaaataaggggatgtaacagataactttatagtttaactgttatatcccctttggaattgctatagtattaattttgatatactttttatttgctgttttcaattgccttctggaatctctgtgcgatttccagcggacgtgtgattgctccgcctaccacgattgcccatacacctgtctgtaatgcctttacggcctgatccggataatggatcttgccttctccgataaccggaatatctgtatcttttgcaagtctctccatcagttcataatccggttcatccttttttgatgtataatcagtataaccgctcatggttgttccaacaatatccacaccacatttccatgcgttgataccttcttcataattggaaatatctgccatcaggataatatccgggtatttctctttgatctgtgcgataaactcattgacagttaagccatcaccacgtttgcggagtgtacagtcaagagctacaacatcagatcctgctgctaccagatcgtctacttctttcatggtaggtgtgatatatccttcatacccgggatactggatcttcaccagcccgatcaccggaagacctgtttcttctttgatcgctatgacatcgcggatactgcttgtacggattgcaggtgtgcctgcctgttttgcagcgcgtgccatcaggtacataatggatttctcttctacatataatggttcatcttctaccgcctgacaggaaatgatcatttttccatgaatcgcatctaaaatctcttttttagttatcatttttctccttgatacagaactgcattccggcaaaatgtccatactcttatctgtgcacattctgtcggaaagcttttcttttacactacagtaccttaacaatattcaactcttcgtctgtcaacacaatatctgcccgttttccgggagtaagggaacccacttcattataaatcccaatacttctcgccggatttgctgttgctgccagaatcgcttctctttccggtacacccatggaaataacacacttcatacaatcaaaaaggcaggttgcagaaccggcgatcgttccgtctgccagagttgcctttctgtctttcatggtcacttcctgtccgcccagttcatacagtccgttctccatacctgttgccatcatggagtcactgataaggacgactctgctgtctccaaataaacgaaaggtattgcgtacagttacaggatggatatggatcccatcaccgatcatctctaccatacagtcctgattatctgctgctgcaccgatcacaccgggttctctgtgtcccatagagttcatggcattataaagatgagttacatgaagtgctccctctttcatcgcttctgctgcgcagccataatctgctgctgtatgtccgatagaaataaccacttcattatgtaattctctgataaattcctcagagccttccatattcggtgcaagagttaccagtttgatcattccgcccgcagcttcgttacatgctctgaaaaattcaatatccggtttacggatataaccttctacatgtgctccctttttcacaggatcaaggaaaggcccttccatattgatacccacaatacgggcacaggtttcatcctgttctacatcttttgcagtctggaaaatcttaagcagctcctctttcggaagtgtcatggatgtcgggcaataggatgtgattccctgagatttttcatattgaaggattgttcttaacccatcaacatctgcgtctgagaaatcatgtctgactgcaccatggctgtggatatctaccagtccgggcagaatcttcagtcctgatgcatccagttgcgttttgtcggttacttcatctgctgaagccacaattctgccgttctctacatacagatctgtaactttataactgccatcttcctgaaaaacttttccattctttataatcatctgatttttgcctcttttctcgctgaagtgaattattaagtacttccctgactttatctctgtcaggcaattctttccactgatactgttgttatcacacaagagccggtattataaaagtcctttttctttaataagacttaacgcatcttcatctgccactacggttacatcctgatgaagctgaaggatagatgcaggtacatttggtgtgatcggtccatacagagatttgtacaaagcatctgccttggcacttcctgttgctacaagaaggattttctttgctgccataatgctcttgattcccatggtgtatgcctgtttcggaacttcatccatgctttcaaagaatcttgcatttgccttgatggtgctctctgtaaggtctacgcagtgagtttccttctcaaaagcttctccgggttcattgaaaccaatatgtccgtttccgccgattcccagaagctggatatcgattccgcctacactgcggatgatctcattgtaatccgcacatgctttgtcactgtcttcttccagtccgtttggtacataggttctgtttttgtcaatgtttacatgatcaaacagatttgtgttcatgaaataacggtagctctggtcgttgtcaccggaaagtcctttatactcatccaggtttacagatgtgatctgtgagaaatcaaggtcacctttgttataccattcaatgagctgtttatataatccgaccggtgtagagcctgttgccagtccaagaactgcgtttggtttcataataatctgggcagacatgatattagctgcttttctgcttacgtcctgataatctttacctacataaataatcatagttttctccttttttgcgtgtcatctgacacttccgatttgttataaactcattataattcccgttggttctattttcaacgaatgtattgtttttagaatcttctttcattttttattattttgagccattttgcagttcggtttttaaagcttgccgaaattactttccttgtttatatttttcatgaaaatatttacattctccttgtgaaacaaattctacaatgttatagtaatctatagcaattccaccatacagaaaggattccatatgtcattaaacaaacataaaattattcctttaattgaatcttattaccatacattcactccgctggaaagaacaatcgccgatttctttattcataatactgaagagcaggatttttcttccagaaatatttccgggctcctttatgtatctgaagcttcactttcacgtttcgcccagaaatgtggatttcacggatacagagaatttatttatgagtataagcagagcctggcaccaggtcccgaagaaaatattccgaattttgaagtatcggaatttaatacttatcaggaacttctgaataaatctaacgctctgctggacaaagcgcagatcacacggatcacaaatctgttggtttctaaatctcgtgtttatgtttacggaagaggcagttccggtctcgtagctcaggagatgaagcttcgtttcatgcgtatcggactgaatatcgaagcagttacagacagtcatattatgaaggtgaattctgttattctggatgagaactgtctggtcatcggtatcagtgtcagcggacagacggatgatattatctcttctctgaaggctgcacatcagcacggagcttatacacttcttatgaccgcaagacaggacaaatcctatcaggacttctgcgatgagacgctcatcttcgcaagcatggaacatctggaatatggaaatatcatttccccacagttccccattttgctggttctggatgtactttatgcacattatctgcagattgacaggagcaaaaaagaagctctgcatgaatatacgatacagacacttcagccatttctgattaaataattctgatatgcaggaaacattcccgatactatccactgccaaaatagccatagaaaatccctcttaagaagattttggttatttaccttgtctacttaagagggattatttttatttattgtcttttacaagacggatcacattccatgatgctttatgcagcatacttgtcaattctccattgtccattgttgtctgctgtgttgtctttggttttacattttcctgtccgaaagcattgactaccttcaggtcatcgctttcaagtacgatatgctcagcaactctgtagccttcgaagcttcttacatctgtattaagaacaacatcctctttcagatttctgtttactgcaaagacagtaacttcttctttctcttcattgtaaacagcaactgcttcaatatctgtgatgcttccgtgtccgcttgtctcatgctctgtggaagagatcaccggctggagtgcaacaccgcggccatatttggaggcatgcataaacggatagaaaattgtctgtttccaggagccgcctccgttggggtcagtcatgatcggagcgataacattaataagctgtgcaaggcatgctacttttactctgtcagaatgacggatcagaacaatcagcatcagccctaccagcagggcatcctcgaagttataaatatcctcaagaagcggcggcgctatctgccacggatgattctctgtgatatcattgtcagcagcatttgaatgataccatacattccactcatcaaagctgaggtacatattctttttgctgcgttttttcgcttttacatagtcgcaggttgcgatgatggtgcggataaattcgtccatgtcatcggattttgcaaggaagtcgttgctgtcatcagaacggtttccatagtatgtatgaagggataaataatctacataatcataagtgtggctcagtacatgatcttcccagagtgcgaaggtcggcatatctttgttggaacttccgcatacaacgaactcgatagacggatcgatgagtttcattgctttggctgtttcttctgccagtcttccgtactcatccatagtcttgtgaccgatctgccacggaccgtccatttcgtttccgagacaccatgttttgaatccgtatggatctttctgtccgtgtttgatacggagatcactgtatttggttccgcccggatggttgcagtattccagaaggttgcaggcatctgtgattcctcttgttccgagattgactgccatcatcacttctgaattggctgcgtctgcccatttcttaaattcatgaagtcctacttcgttcttttccagacttttccatgcaagttccagtctgtgaggtctttcctcaaccggacctacgctgtcttcccagtaaaagttggatacgaagtttccgcccggataacgtacgatcggcacgtccagttcttttaccagatcaataacatctttacggaatccgtcagcattggaaagcggatgtcccggctgataaattccatcgtatacagctcttcccagatgttcaataaaggaaccgtaaattcttttgtcgattttggaaatggagaatgctttgtccactaccatttttgcctgtttcgccataatgttttttgaacctccgttcttaaatttagtttgagaaattagtttgtcgttatattatttgagctgcctcataagtaatgtcaaatgatcaccggttacagtaacattaatttcaaaactcaatgggacagctcattttatatcatgtcagcaagttacgatttgaatatttacaacttttgatcaacccttaacagcaccggatgtcataccatcgatcaggtatctctggaagatcaggtagatgatcaggattggaagaataccgaacatggaacctgcgatcagaagattgtagttatttccataaggtgtaagcagtgtattcagaccgatctgcagtgtaaatttacttgtatcacggaataccagcatcggccataacatattgttccaggatcccattgcacaaaggatcgccatggatgcaaatgccggtttggttatcggcatcataatcttaacactgataccatactctgtgcatccgtcgattcttcctgcatccagaagttctttcggaagactctgcatgtactgtttaaagaagaaaatcgtcgacgcaccacatagtccggggagaataacaccggctcttgtattgatgatcccaagagatgtaacctcgttgtacagaggaagcatcaggatttcaaaaggaacacacatagttgcgattaccaggaagaataaaaatccctgaagtttaaatttgtacatggtcagaccgtatgcgatgaagtagcataccagcagtgtcagaactactgtgatcagtgtcaggatcaaactgtttttataccacatgaaatattttcgggaatcctcatttccggaaaacaggtatttgtagttgtccagatgcatcttggagaaatcaagattcagggacatacctttcataaccacttcacggccttcctggaaggaagcgaagaaacctgcaagaagcgggaatgcgatcagcacacagaggatagcgaaaagccctgtggataatacagacgcaactttatgatttgattccattgtctttggctgagctgctgtttttgccatatcacttttcctccttcttgaatgttcctgttgccacgagctggacaacattgatagccagggcaataactagaagtaccatacctacggcacacgcataacccatatcgtttttctcaataccacgtttgtacagatatcctacgatggtaagaccgatgttcttcggagaagagttaccgttccacaacatgaaactctcaaggaacatggacagaccagcgtatacggaaattgtaataacatagatggttgtcggtttcagaagcggcagtgtcaaataccagaatttctgttttgcattggcaccgtcgatatctgctgattcataaagagatgtatcaatactctttaaaccggaaataaaatacagcatgttaacacctgtccatctccacatacagagtaataacagagctatccatccggtagtcttttctttcagccatggaatacttgcatttccaagcaaatgcattaactggttcatctgtccgttatcaccttctgagaacatcagtcggaataacataccggaaataactacagatgtaagtgccggaatgtacatgatcactttccatacgcctttggctttggtaagacggctttccatcagtactgcaagcatcattgggattggaatcagcaggagcagtgtcaaaagcatgtattccacactgttaaatacagccgtcttgaagaacttatcggaagccagtttctgataatgcttcagaccaacccactgagaaccgccaaatgaaatatcctgaaaactcattacaataccactgatgagcggatataaccagaataccagaaggctgataacaaacggaagtacgaatacgtagggtgccaccttctgagaatagagcatctttttcactttattcacaatgaattcctcctcttctaaaaatagcggtaacttttcagtatctcacagaatcatgatttactgaacagtcacagataatttcttttttcttattaccattatcctgaaaagaaatcagactccacatcctgtgaaaatctcatttctcaccaggataacagtagaggaggtcagggaatgcggttccctgtcctcccatatcatttcggccactgcagtaaccgttctttattcacttgatcagtgaaccattatcattttattattcacactcgaaatcaagataatcctgtgcatcctgaagcgcttcttctacatccatgccatcctctaatacattgttcagagttgttgtacacatgtagtcgttcagtgtcggagagttctttgttgtataaacagttccgattgcatcattttcagcaagttcattcagcacttcgtatggttttacgcggaagaatgtgttatatgtattggactcatcataagcaaacgcttcatcagaccataaagctgtgttgcagacatcaaatccaagttcattccagatcaggttttcaccttcttcagagcatttagcccatgcaagccattcagctgcaagttcaggattctcacattgatttgttacaacagtacctgtaccaccgataccaacggaacatttctgtccttcttcaaatacagggcatgttgtgatgtcatatttgccttccatctctggcatataatctttgaaacggctcatgtaccacatagcttttgggaaggaagcaattttgccatccatgatgttggagaaaccagcttcaaggtcaacatgtccgtctgtggataccattgcgattccatcatttaaccagttctgctgcattgtgagcatttcttttacagaatcaagctgtacgtttacagttccgtccggaccgcctgtccagtcttcaccgttctcagccattgcaagccacatccagtcaacaccgcctgtatcaacagaagttaagtacacttcaccgttggaagcttcttttaattcttcaccaagttttgtataatcatcccatgtctttacagatttgtaatctaatccgtaagattcaagaagatctgcgttccagtacataacagttgcacctacatggaaaggaacaccaagtcttgttccgtcagctttagaataaacatcaagtctggactgcaccattgtatcttcatatggagcaagtgcatcattcatggaatacagaggactgtcatcaccggaatagttcgggaactgtccgatttcgatgtcgcagagatcaggagcaccggatcctgcctgtaaggacatcattaatttgttgtgcatgtcagaatatggatatgtactgaatgtaatctggatctgtttgtccggattctcttcattccacttgtctaccatctgaccataaaactcattatgcaggtctacgaatgaccacatctcatactttgttccatcatcaggacctacggttgttactgctgtaggttctccctcagccggttcttcgctctcagcagcttcctctgttgtgtcttcttctgcaaagacattcactgccatgcccatgctggacactgccatagccgcagtcataagtaacgcgaacaattttcttctcttcataaaaagatcctccttttttgcatttctttgcgctcttccggtttcaatgatgccattgtacaaaccccataatcatttcgtatttttttaaaatatatagtccatctttttgtcatggtcattttgcacaatttttttattttcagctccggtttatgttgatattatataattttttcctgtaaatgtcaatatatttttgatttatttttattattttagttttgtctaaaataaatgcctgttatttattcatcaatctatctatttttttgctattttcctatgtttttttaactaattttatggtaaaataactaatcaaaacgtatttttctaaaatttcttatttagtgttatatgcctgtaaatacagtcaaaaggaggtttttacatgaaatcctgttctgtttccgatggccttgccatcttcaaagctctaggttcccctgtccgtgtacagatcttgcgtctgatccagaaaaaagaaggtctgaacattaagcaaattgcacaaaacctgaaaattcccgttacaaccctgtcccctcaccttaatcttctggctgaagccgggctgatagaattcagggatgaatctctcacacacggaacacagaaatgctgctattttataaaagactgggatcagcttctggtaaatatggcgctttacggtcctgatctgcagacttacagtgcagaaatcggcgtgggacatttttctgatttctcggtaactcccacctgtggtatggcaacttctacttcttttgtgggacagttggatcagccacggtatttcatacaccccggcagccgccaggcaagaattgtctggttcaccaccggatatctggaatatatactgcccaatttcatccctgaccacagcgtgattgaagaactgacagtttcctttgagatcagctccgaagccccccgattctgtgatgtgtggccttctgatattaccttttccctgaacggtgtgatccttggcacctggaccagccctggtgattatggggaccgcagagggaaatacaatccttcctggtggttttcttttctgaatcaatatggtttgctgaaaaaactgacgatcacccctgaaggcacttttcttgacgcagaaaagctgtccgatgtttccatcagacagcttgcactcactgatcagtccgttatgaaattgcgcttttctgttcttccgggcgccgaacatcccggcgggtgtactctttttggtgcaggtttcggagattataaccagcatatacggattaccatcggttatcatcccgaaaacatctgatttctccgcctgacttcagatttatatactgccccgaatactcccacagccatttatggcaacagatatttcacaccccatatagtttcattattgtcacccttagcgctgaagcacatcgtatcattgcctgcctcatcggtcatttccaggacaactcctgtataagtattttcaccgagagtcacatcaatatatggtgtgccttcttctgcttcccatttgccttccagttcttctccggtaactgttccgtctgcattaagttgaatcctctgcggtttatgtaccctgtccgaaatatccgtaccatgatttaccagataaaaagtaccctggatttcatctccggaatatccatcctctttcaacgtctcgccgtctgtggcaaatggcgcagcaaccagccatccgtcttttgtgcggaacaactgatgtacacgaggctcatgaagttctccggttttagcaaaacgctgatgatagaccaggtataatttaccatcttcatcttcaaatgcagtctgtccgcctggcgccatataggtctgggtaagactcgggaatgtataatttcccatcattttcagtccatgatctttatgctccacaaataaatacatatccttccctgctgcatctgtataagttccgtctacagtgtcacagcggaagagacgcatttgataacctccttttgcctgcagatttccataggacaaaaacagataataatatccattggtctcatcatacataatatgcgggccttcgatggagttgtgataaccaccgagaagtttcttgccataatagctgtccacatgattttcttcgtctgcttccggataaatcggatagccggtctcttcatcaatctcaatcagaaaaataccgccggaccaggagccataaaccatccacatacgcccgtctttatcataaaaaacatccgggtcaatacagtttggccagttattattgtcataagacgctgctgtatatggccttgggtctgttcccatcagttcttcgatattactttccttaacatcatgatagctataaccagagtacaggaatgtgtcctcatagtgatacggaccttcaatatcatctgctgttgcaaagcagatattggatttcacataagaagatgtggtgcagaaatacatcacatattttcccatttttttgttatagatgacatccggtgcccacacggaataaccaccttcctcgttctttcctacataagtaaacgctgccggatcgccgtcttcttctccgtcaaaaagattgtcaaacagcttattctctgcattgaccccggaggaaaaaccggtccagtttctcagatctgtggacttcgcagattccatatgggagccaaagatatagtaagtgtcattgtctttgatgacagatggatcatgcacggaagctccggcagtaaagccacctttcttaatcttgctctcaatatcatctgcgcctgctgtttctttttcgtttgccgcatctgttgtctctgctgtgccatcagcagtttccgcagcatatatactctgtgctccgagaagcatcattcctgtcagccccaggatcattccccatttttttctcataccagctctcctgttctccaaatattattctctctcagattacgttaatcttcgtaagaaaatatcggtgcgcctgttttttcatcccagcggattttcatcagcatggcatgacggtttggattgtacagcggattcccttcaatctctgcttctgttctcgcatgataaaccatgaccggatttccttcttcgtcttcagtgaaggaattatgccccggtccatagattcctctggattcatctgtacgaagaaccggataacgttcttttgtccaggatttcgggtcaagaagatcagaatcttcatctgctgcaagcattcccatacagtatgcagcgcctgtctcagatgcagaataggtaagataaatcctgccgtcatgatgaataactgccggtccttcattcacccagaaaccaactctttcccagtcataatccggtgaagtgagaagtacctgaacggttttcagtttatacggagtttccatttccccaatataaagattggaaatctgcttgccgactcctaccttctcagcccatacatagtaatgttttcctttgttttcaaatactgttgcatccagagagaaagcttcaaaagaaaattcatctgcatccgcacgtcccattttgcctttctctgtccaggctcctgtaagcggatctgtatctgcacattccagcacatatgggcggattgcccagatatcatctttgtccccgcccgcaaaatagatgtaccattttccgtccagataatgaagctcaggtgcccagatatgttcgctcatgattccttctttgtgtttctcccagactgtcacttcttccgcatctttcagtcctgccagagtttcgcttcttctcagcacaatccggtcataggccggtatggatgctgtaaaataatagtttccgtctgtgtggcggtaaacatatggatctgctctctgcagaatccatggcttattatacttaagttcttcactcattgtgtgtccccctgttcgcttttattttagatttatataaattattttttatatatttaaaagtgtactgcatttttcagaaaatatcaactatatttttttcttttcgttgcacattttttgcagattcgttataatttaccgtaaacgttacaaaatcatttttaacagaaagggaaatccgttatgttatatattaaaagtctggagcaggcggttcctgtcttcaaagctcttggttctgacatccgcatacggctgatccagactctccttgagcatcaggaaatgaatatgaatgaactggcttccagtctggggattaccaacggtgccctgaccagccatgtaaagaaactcgaagaagccggaattctcgcaattcttccagagcattccggtcacggaaaccagaaggtctgccgcattaatgttgacaagattttggttgatattgcctctaacaatgacagtccggctgaagacagttactctattgacattccgattggcaactactttaattattctgtttatccgacctgtgggctgtctactaccgataatcttattggtgaggtagatgatccccgttattttgctcatccgagccatgtagatgcaaagattttatggtttggacggggatttattgattaccgcattccaaatatgctgcctccgggacagaagattgaccggctgacactctcctttgaaatcagttcagaagctcccggagtcaataatgactggccttctgatatttcctttttcctgaataatacaaaggtcggaagctggacaagccccggggatttcggtgatgtccacggtatgttcacccccgactggtggttcccgaactggaatcagtatggtctgctgaagatgcttgtcattgaccgtcacggtacttttatcgatggattaaagatctctgatgtgaatacacagcagctcacttttacctctcaggatgatatggtattccgtttccaggtggatgaaccatctcagaatatcggcggtctgacactcttcggaaaagatttcggaaactataatcaggatattaatgtgaaagtgcattatactccaaatgtataattttacagagtatctgaaaacagtaaaagcaaggaaccgatgtgttttgccacatagttccttgcttttattttatattccctctgattttccggttattccccacgcatccagactctcatctggttttctccgcggttgccccatgtataatacggcactgctgtcagtgttgtcagcgttctcaccggtgcaacttcactgtacagagaatctcccactgtctccagcttacgtgctttgatcttaagcaggacgcagccttccagcagaccctctttgcagacttcctcttccatctttgcatcttcaaagatgtggtaagactgaagcagacccggattatccataccctcgaaacaataaaccatcggcccgcgcataaacgctacacagccggcatcttctcttactttaaggtttgcataaatcttgcggatcttcatcgggaaaacaagttctacttcatcattttcccacactctcttaaggatcagatatcccttttccacatctgccgtgatatctttcacttttccatttatacgtacctgaacagaacccgggcgtacccaggatgggatatggattcccaggatagtctcttcctctgtttttccggttatatgataggtcactctgccatcccacggatagttgctctctacagttacatccatcttatcaaagtgcgcttctgtacctgccgggatatgagaataaactccatcttctgtctcactccacagatatttaccaagagacatcagcagacggactacattgggagggcagcatgcgcatgtataccagcccggacgctccggcagaacatgcttatatccgtataatttcccgctgactccaggttctgtttccagtggatttacatagaaaaatttctttccgtcaagctgcattccgctgatgatcccattataaagtgcacgttccatcacatctgcatagcgtccatccattacattatcaagcatctttcttgcaaaaaataccagtccgatagatgcacaggtttccgcataaacggtgtcattcggcagatcataatcaatggtaaatgcttctccgtctacggtactgccgattcctccggtgatatacattctcttctgagtcatgttctcccagagatcacagcatgcctgatagagtttttcatctttgtaaagagaagccagttctgccatggcagtatacatataaacagcacggacactgtgtcctactgcttctttctgctcatagacagtagcatgtgcctgattatattctctgttatgcacatccatatcaaagtgaacccagcctcttttttccctctctttgacaaagtaatccggatcttttccacgctgttcaataaaatatctggcgaggtctttgtaattttcttttccggtcacttcatagagacgcaaaagtcccagctcgatttcctgatgtcccggaatccccggttctttgccttcttctgttccaaaacgtttcccgatatgttctgccatgcgctccatcacatgaagcagacggtcttttccagtcacctcataataagccgccgctgcttccatcatatgtccggcacagtataattcatggcattcctgtaaattctgccagcggtgttccggctctttgattgtgaaaaaagtattcagataaccgtcatcctgctgcgctttttcaataatttcaataaccttatctgcacgttcttccagttcagcatccggacggacttccagtgcatacgccacaccttccagccatttggcaacatcactgtcctggaaaaccattccgtaaaactcaccctcttccagtcctgctgcaatgcggaagtttgccagtgcatggcttttctccactcccggaatctcatcatttaatattttctcctgataaggaattactgtatccattaccagttcctgatatcctcgccagaatttatccgttacttttaccttatttaataacctttcttttaaaccatctctcatttctgcgcctcccattttgccggcagatccggacattttcgcaccttctgtacagcccgcagttccacaaagcatccgcaaagcctgcacatcccattcattaagcggtcacaggtgctgcatatgttaagccttttttcgtaaatctgctggtctactttcagatcctcatccatgcgctgaatgtagcgtgacagatcctcgtaaaaagtctcttcattattctgtccgggcagacattttctgcacacacgcagcttcccgttcataccttagtctcctttttgtttccattataaatattcacagaaaatacctgcctgttttgtcagaagcggcattttctgtgaatctgtaaagttcattcatttttatacaaaactctttatctgtgtcaagcgaataaaatcatccgcttcactacctgattcgactaaaaatcttgtaattatcttacttccagatgaagaacactgcatttaggaattgtgaatctgattccttctgctgttttttctacttcgttaaattcttttacacgtacctggtccggtgtttcgaaggtattcatttcgtgcatttcgccgtgtacgatctcacctttaacttcatttacctgatagtctgtaaggatagttctgatctcataatctttatccagagacaggtttgtcaatgtgatatgtacagctccgtcttctgctacagatacagattctgtcaggttcggtacctgccactcttcttccacaccgatggtttctgtttcgatagaactgtctacaagcattgcatcctgatgatatttgtacatatcaaatacatgataggttggtgtcaggatcatatcagcaccatctgtaaggataacggactgaagaacatttacgatctgcgcaaggtttgccatctttactctgtcactgtgtttgttaaagatatttaaagtaatacctgcgatcagggcatctctcattgtgttctgctgatacaggaatcccgggtttgttcctggttctactgtgtaccatgcgccccattcatcaacgatcatgccgatttttttctctggatcatattcgtccatgatatgtccgtgacgctcgatcagagtttccataaagagcgctttattcagactcttataccataccttatcatcaaaatctgtagcacttcccttgatctcccatccttccggatgtacataataatgaagggaaagtccgtccatgttgccgtgaagttctttcaggcaatgattatgtgtagtttttaatacttcggaagtccactcatagtcatctacattggcaccgcagcagactttatggattgggtgatccggatgataattgcggacataagtctgataacggcggtattcatttgcatagaagtcaggattcatatttccgccacatccccagttctcatttccaactccaaagaaatccagtttccatggtttctcatgtccgtttttcttacggaggtcagccatcggagaaacaccctcgaatgtgatatattctacccattcagacatttcctgaactgttccgcttcccaggttaccattaacataagcttcgcagccaagctgctcacagagttcaaaaaattcatgtgtaccaaagctgttatcctctactacaccgccccagtgtgtgttgatcatttttttacgtgtttcctttggtccgataccatctttccagtggtattcatctgcgaaacatccccctggccagcgaagtaccgggattctaatgtgcttcaatgcttctactacatctgtacgcattccgttcttgttcgggatcggagaatcttcccctacatagattccttcgtagatacatcttcccagatgctctgagaaatgtccgtaaatctctttgttgattttgctctgtttctttgatggattgattacaagcttagtcatttttacctccacagtttatgatttcaggtttttattttacctttttctaaaataatatactttattttgtacgctcattatacacaacttctgtgtaatattcaatatgttttctgcagaattgctatgataattttacataagaagaagtcctgcccacagaaataaaaagagccacaacagatttcatatccatctgttgtgactctctcatttacaatcctacattcccgctgttcatcccttctttgctgtccttatcaagtggcagccagtccagaactctcttaatataacggttccagaaatcccactcatgtgctcccggaccttcctcataagttacatccacacccagtttctgcatggtatctctgaacttacggttcggaggaagaagcggatcgtccagtccacaggcaaggtacatatgcggaaatgggattccatcttttttcatattttcggcaatccattccggattgatctcacagtctttgatccgggacagatctccaaatacattctccagaaagctttttttctcaaagaacataggagaactgtcatctgctgtcctcattttttcaagaatcatagcagaagaaagacctgcgatgtatccgaatgtgtcatggtatttcagaccatttcggatcgcaccgtatcctcccatggataacccggcaataaatgtatcttcttttttgtgagataacggaaacattcttcgtgtaatctttacaagctcttttccgataaattcactgtagttttcatttgcattcggatgatccatatagaacatatttgctccagatggcataactactgccagattcttttcctctgcccatcgcttaatacatgttcctgttacccagtctgtgtaattccccattactccgtgaagcaaatacaaagtcttaaacggtttgttctcttcttctgtttcttctccaaaaaacactttatcaaccggcaagattacattcatcgttaccggacgcatcagtgcttttgaaaagaagttcacttccattaatgccatcttcttatcctcccttatgtttttgcaaagcctttacagcattttattatacaaaaaacacctgaaaaaagctactgccatatccgacagtagcttcttttctcagtactatttttccccttgcatttccataaacaatatattataatctattcaaagaaatgggtttctgactatctgactattcagtccaggatgggtatctcgtttcttttttaatgttttgtatatcgtacaaatacaattttttatccgctgcatatcttactattagcacagcctgatatacattgtaatccaaaatatcacctttctcattcataacaggtagagcaaatcgtgtactatatcgaaaccaaccatttccggcttttttcttgtgcttattttcgaaatcttctttccatctcttttcagtagcaatttctatcatttggggaattccttgagacatattagcttttacctttggtaatgcacctgtgaattaaaaattttatccttacacgactgaagtcgcgtgcttccagacgctttaggcgtcagactaaatatcggcggatacgcctgtaacttaggccagcgcagttatgcgcattttcccatgccagatatggcaggttcccacattgcaggtagtccgctgtatatctgcctgcatttatgccgcctttaagatttccatttgtaaatgaagttctttcagatctgcataaacacatgaggttctacgctttaccggagggacttttgcctccagcaaagacctttccgttaccggaaggggttttaaaagttctctgataaaatatcttgccccgatattatacgatgccgacaggtcacagttatattgttttcctgtctggaatacacaaatactgtgattcttcgggttacgggatacatttccagaaccatcatacgcaagcctgcttgtattccatgcacagactctggatatgcgcattccttttctgtgtgcctgatgttcacaacgcttctggatatcccgttttctccacagatgcagtttctgctttttctttccggatatcttcccctgcatttccagatattcgaatacgatcacatccgcatggttttcttcggcatattttacgatcgcacctgcaatttttcttcccatctctgtattcagacgtttcgtatatgcccatcttccccgtgactgcgcagagccgtgctctctctggaatctccggatccgtcccagtgtgcggtacatccggtctttttcactgggatgatcgataaattttcttcccaggacagttccgtctgcccgcataatggtacagaccgcatcggtattgattcccaagtccacactacagatgatctgttcttttaccggcgtttttgtaagtgttacttcttccgtataagaaaaacgcaggaaatatttatggtatcttttctccagtgtcggggctgatgcctttttccccgaccagttcttgcgcagatattccatatccgtatgatttaaacgcacacaaaaccatttccagtcatggccatcatacagtttcaggtatgcttcgtcttttccttcttctccttccctgtacattacatcacgataaaaaacaggcatggcataattctcatacgccagtctgggtttccctgctttttctcctgactttttccacagatccatccgtgtttcgtaagaagatacacttcccaatgcatgctggattgcggctcgtctcaggtaggacggcatcttcgggaagcgaagatcaaaatcaaagcgtgcagaattctttttcgtggtatgtaccagatgctccgcggcattgaagcgtctcttgctatcggaaatctgttccagttcttcccacacctgcccatatatttctgtcagataactgaccgcagaccggtagatttccagggtctgatggattggaatattctgttttcgtaattctacgccatagctggataaaacctgcatcccttttcctccccgtcagacaattatctgccttgctccaatttatcttatactgtttcatctctaactatatctctaactatattctaacatatctaatcgcttcttgcaaacatttgttctgtttttataaaaaatttgcgtgtctaactcatcaaagaaaaattgttaaaaacgcttgaaatctggagcaaataattttttacaaacccaaacaatatgcttttcattatatactatgtaaaacaaaaatcagcagtaaaaatacctaaaaaaagctactgtcatatccgacagcagcttcttttacgctcttagagcatgtttgaaaaaggcttttcacaaaatatacgtcacaatttgtgggaatgattttttaaacacgctctaatgctgatgtaaatatttttctctggtagcgagcccgcctctgatatgccgctcctgcttgttcacatccagaacctgtctcacttcacatgccagtcccggattgagctggctgagacggtcagtgcagtccttatgtacagtgctcttactaatcccgaatttcttcgccgcctgacgcaccgttgcctttgtatcaataatataatttgcaatttccactgcccgctcctcgatataatctttcacggataagcctccgaagacgctgtttttacagtgtatgcacagaaatttccgaatatgtagcaatcgtttttatagttgtgccttataaaagaacggccgtccataccggacgaccgtttcgctcattgcaatcttatttaaatttaatctctttcccttcaagtctccactgtctgaattctgcggaagcagataacagaagatctgacgaagagttcagagctgtttctacagaatcctgaactacgccaatgataaatcctactgcaacaacctgcatggaaatgtcatctgaaattccgaacagagagcatgccatcgggatcagaagaagtgatccgccggctacaccggaagcgccacatgctgacagagctgcaagaagactcaggataattgctgtcggaatatctacatgaataccaagagtaaatgcagttgccattgtcataaccgtaatagtgatagccgcaccatccatattaatagttgcaccaagcggaatggttacagaataagtatctctgtccagtcccatctcttcacagactttcatgtttaccggaatattagctgcggaacttcttgtaaagaaagccgtcagcgcacttctcttcaggcagtggaaaatcagcggatatggattctggcggatgcaccagtaaaccagaagcggattggtcacaaaatagataaacagcatacatcctacaagaagaagcaacagttttccataagtcgtaaagatatccagaccgtttgtagatactgtgttaaataccagaccaaaaattccaaaaggtgcaagattaatgatccaggttactaccatggaaataccatctgcaacatcagccagaaccttctttgtcatcttatcagctgcacgaaaagcaagcccaagaagaacagcccacatcaggatccctacatagtttgcatttaccagtgaagataccggattggcaactacgttcagaagcaggttatttaatacctcaacgataccctgtggtgcacttgtatctgttgctgcatttgcaagtgtcatctttacaggaaatgccatactcgcaaatactgcaatcactgctgccagaactgtactgaacatatagagaatgataactgtcttaataactcctccatgagattttcctgcattacacagggaactgataaccaggaagaataccagcaaaggtgcgattgccttcaatgcacttacaaagacatcacccagaattgcgattcctgttgcctgcggtacagcaattcccagaatcgcacccagaatcagaccaaccaggattctctttaccagagcaatctcggtccatttgtcccaaaactttttcatttctttaatcctctttccctttaatttgataaaacaatgatacgttacattataaaggaagcacatagaatatgcaagaacatctttataagtgtattgtatttctgtttttaaattattcaaaaaagcagatgtcgttcaatcatttatatctgattgaacaacacctgctttctctccggcgcagtacgattctgtccggaggacctttttatgttataggtatattacggaataatttcctataacatgaaaagtctcagcaactctgcctccggaagtggtcttgagaagtaatatccctggaccatgtccacaccccactctctcagcagactcacctcttcttctgtttctgctccttctgctacaattgtataacccatattctgcataaccgtcacaatactgtggtaaaaaacagcagcctgttcatcacaggtaatccctgttaacagcgatctgtccattttcaccacatcaaacggaagtctcaatactgcattcagatttgcataccctgaaccaaaatcatccagacataatccgattcccgcattcgtaaaatcctccacagctttgcagaaactttcactatattcagttgccactgtctcagtaatctcaaactgaaaatatttcggtaaaagttcatgctccttcactatattaatcagaagctgactgtgtcccggttttagcagttcggaaggtgacagattgaactttacattcttaatctgtttcatcatatattcattctctttaataaaacggcacacccttctgaactgaagcagtccgatctgtgcaatgagcccctgcctttctgcaataccgataaacacatccggcgggatcattcccatacagggatgcttcagcctgctcaaagcttcgagagtaatataacgatcttcctttgtccagaataccggctgatagtacacttcaaacaggtctttatccactgctgttttcaggaaatgctccacctctttttcataacggaagccctccagaatcctgtcatctgactggatcactaccgtttcatctgcacgttttaccaaagatatcagatactcgatatatgccagcagtacatcttccttctccatcttttcaccgttgataatcccgcagatgattgccggaaaagtgattttttccccgtcagtttcaaaaggttctttgaaatagttctcaatctcctgtctgtttttctcatattctgtcaatgaatctgtaatgatcagaaaacagtttcctgtggttcggaacacctgtacagaacctgtaatgttttgcagttctcttgcaatctgtaccagaagcagatcacctgtactgcttccgtaaaccttattaatctgtttcagcataaacagctctacagcaatcacatgaaactcgattcctttggtaaatttctcctgtatccagttatcaaaataccttttatcaaatgctcctgttgtactgtctatataatcacctggattgttcatcataagatagagaaatatgagaccaagtgccagtccaaaatctgacagaaatatgtaccctgtgtacagttccactcctatacatacgccttcaatcacaagaaattcgcctgcaatactcatcttttccggcgtatagtcctccctgcttctgatcatacgcagcattatcagaacgatataaaccagggcataaagataaagaaacacataccctgttcctttttgaaaaacgtcattactgtcaaaacagaaaaatcccccgcttccaaggtttccaagtacagctatcatcatagccaccgtaatcccggcacagatcacagataatgcaccgctctttttctcattttcatgcgaatcaggaatacatgaatacaaaatataaggaatcagaatatcaagcaaatagattcctgtcagaatacccatgacagttccttcatcttccgctgtgtaattcataattgtcagcgtacccaacaggtcagacaaaatatataaaccgctcaggacaagtatatatgtaaatgttttcacatttgcattatgcagtttcttctgcgtcagaaaatgatataagagtaacgctgtaataataactgccgctacctgaaagtttatattataattcatgtgtctttctctctttcattttattctgatacatattcgtatctgcctcatacttccattcaccagttgtcttcagctttcccctgtcatcccgaattgaactgaaacctcttgaaatagacatgcgatatctgctgtttctgttataacgccttatttctttatccagtttctcagacaatgcattcctgtcttcctccggatcaaacacaactaccgcaaactcatctcctcctgtgcgataacattttccgattgctccaaaaacattctcaatgcatctggcagccgccacaataacctcatctcctgccgctctgccaaaatcattattaatcctgcgcagataatcaatatccataaagaccagcaggatatccttatgctcattcacggttttcggaatttccgccagcagattttcaaaaggttccctgctctgcattccggtcatccagtcctctttcatcagtcgttcatatgcctgcatttctgtccggtaacggacctttccaacaagactgatcacagtatctgcaatgatcataaccagaaataccagtattccaaactcaaatattgctccataataggatatttcaaacagccagtacaatgacagtgataaaagtccactgaacaataatatcatataagcaatcaatatgatctgcacacttcgatccggcttctttctatattctttccagagcagtaccgctacgatcagtacccacgttatcagcagaacatgtgttacaaacagcatatctgcaaacgtgaataccccgaaataggccagaagtccctgaataaatgcattcagataaaacacagcaattcctgcatccagaatgcgttcctttttcagtccacctattttccgggcaaaatgcagcatcggtaccgaatgtaacataaacatataaaaagaaatcgtacaaagcatatccggatgactgctataggtctggatcgcagaagaatctgtaatcagccagactgcacatatcataaggaacaatgctacatcgcgaaatctggtatccggcatctgacggtatttcagatagactgtaattaacagagaaataatgctcaaaacaagaaaacacaaagcaatacctataactattcctgaattccgcaaatgtaaagcaatgactgcacttccggttccaatataaacagaagccaaaacatactttccgtgatgtgggtttgaataaatcagcttcagcggctcattctgtatgtctgtggggatttcccctgcacattccagttttgatttcatctgcgtatttcttacaaaggttgtatcctgatattcataaatgggacggtcacccagccagattttcaggtcatactgtgcacctctggttgtaactaccttaccggcatccagatcagtaatcccgtcattatataatatcagttcttccccttcctctgcctgtattgtatccggaagagtaacttctgttctttttccgttatcataatagtaccagccagaagatatcttcctgatctggttcaccggctgcatcttttcccccagtgacataactcccagaacagctgcaaaaacagccatcaccatgataaacaaaaatatctctatattttcttttttcttcttctgattatatttcacacgcttctccttctcttatttccagaatcataactgttcagtacctcagcagggtaataaactgctgaatagttacctttatattattttctgaaggtactatcagaaaataatataagggtactataaaccaatattatactaacatcccactataaaaaatacaagacacaaaaacagccactttttacagtgactgttttacttctgctgttcttttttcctgttgatgatccgtctcattatactgctcaaaacgtctctcgatctctaccagcatattcgcatattctcttaattcctcttttagctgttctttatctgtgcgttcctttttgtaggaaatcctatgctccatactggcccagaaatccatggacatagtacgaaactgtatctccacagggaagtattccatgccatccagacagtataccggcactcctacgatcacatgatagctccgatatccattgggcttcgggtttccaatgtagtcccgttctttgatcactatcagatcactctgactcttcagaatttctgtcagattatagatatcatctacaaaatagcagattaccctgacacctgcaatatcctgaagataatccttcgcattcatcacagtaggttcttttccctttcgctgtaatttctcttcaatgctctgtttcttcttaatcctgcattggatgttgtggatcggtcttgcagatgcttcaccgtacaggttgtgattcaacacatcaagacgtgtgagaagcatctgtttagcatcttcatatggttgtataaattcatagtattcttcatctgtcataacttatttctcctgtaaaaacctctgcagttattcttctgcctttcatatttcttattctgtacatctttgcagaacttatctttttttccacatttgtactgcaaaataaccattttttccccattacgtctccatcatacaaaagaaatgtgtttaatcagtgttccaattctaatcattttataaacaaaattctcgtccgtttacacttacatacggcactgcttctcatgcacaatctcgccacactcagaacatcagcagacttatgggaaataaaaaagcactgactgtaacagtgctccattacagccagtgcttttttatttcatcttataaacatttacataatcttacggaacagatctttcagatcttctacacttgcatctttcgggttccccggtgcgcatgcgtctgcatgtgcggattctgccaggaactggagatcttcttctttgattgcttccagtttagtcgggattcctacatcaacagagagtttcttaacagcttcgattgctgcttttctgtattcatcctgagacatttcatctacgcctttgacacccattgctctggcgatttcacgatatttctcacctgtatattcctgattgtattccataacaatcggaagcatcattgcgcaggcaacaccgtgtggtgtgtcataaacagcaccaagtgtatgagccatggaatgagcgattccaagacctacgttagagaatcccataccagcgatatactgtccaagagccattccttcacgaccttcttttgtgttttcaacagcaccgcggagagatttggaaatcagctcgattgcttttaaatggaacatatctgtcatttcccatgcagcttttgttgtatatccttcgattgcatgagtgagggcatccatacctgtggaagctgtcagtccctttggcatggaggacatcatttcaggatcaataactgcgatgattggcatgtcatgtgggtcaacgcatacaaatttacgttttctttctacatctgtgataacgtaattgatagttacctctgctgctgtacctgctgttgtcggaactgcaatgatcggtacacaaggtttcttggtcggagctgtaccttcaagacttcttacgtcttcgaattcagggtttgcaatgatgataccgattgctttggaagtgtccatggaagaaccaccgccgattgcaatcagataatctgcttcagaatctttaaatgcctgaacaccatgctgtacgttctcgattgtcgggttcggtttgatgtctgaatacagttcatatgcaagtccgtttttctcaagaatgtctgtaactttgcttgttacatggaattttacaagatcagggtcagaacatacgaaagctttcttaaagccatgggcttttgcttcgtttgcgatttcctcgattgctcctgctccgtgataagatgtctgatttaagttaattctgtttgccataatgatttccattcctttcagtattctacagtatcaggtaagcttccgcatcgcttatctttgttattatattaacaatatgaaataaaaaaagaaagttacactttcgttcaaatgtaactttctcacaatgtttgtgcaatagtgccgaaaaaataggtgcaaaattatgcactaatattgttatatttatgacaatatttccagcttttcaaacaattccgagagttttccaggcatcccgtcaactaaaattttcgccagtccctccggtgcacattccaactctcccagtacccattttacagtcatataaatagaactctggcagtacatttccagaatacaatgtatagtctcatccgggattcttcctgttttctcacggatcagattttcatagaagtccaggatcagttcaaaatcatgctggcgcagactattttggctgtcgtatttaaatgctgctgcaaagaaaacatgctcttcctgaatataggtaaacttctttaccagagcatcataaacagttttccccattcccatatgctcaaaggatttcgccagaagcttatcaaaataccagttgatcaggtcaaatttgtccataaaattccgatagaaagtctgcctcgtaacaccacaattctctgtaatctgttttactgtgatgttatctacagacatcgttttcatacattccttcattgaccgcgcaagacggtatttcattttctcacccttacctgcttcatttatcatatccatacaaattcctctcacagataaaacttagtgtgttcattatatcaatttcttccctgtatttccagatagtttcttcctgaaattcgtattttaaggagcatattttagttattgttcacacaccactattccgcgaggtgttttggcatgaatatgccaaaatcccgagacatacaagccaaaattccattgccgcaggcaatctggaatgaattttggctacgttactgtgaacgaagtgaacagtaatatattttattttgatttttctgtttttatttacttcaaaatgttataatcgtaaaagataaaaataaataatccgctttaagaagggagacattcttatggatttaataaaagaagcactttccatgggtttcgcagatgcggcgatcatggatacaaaggatctggtatttgtgccggaatacagacagttctgcgaggacaatctctgtggaaattacaacctggttcctgcatgtccacctgcctgcggtactgtagaagaaatgcaggcaaaagcattgaaatatgaaaaggcactggttctccagactgttctgaaggatccgatcatggatccagtacttttcaagcaggcgaaacatgcacagaatattcttacagaacagcttgccagacagatgcaggaagcgggaaaagaagatatcctgatcatgagcgcaggaccgtataagaattgttcctgtatgtccgcctacagtgtagatgcacagaaaatggctgatgcagtaggtatggtctgctgggcagatgactcagatgtaagattctttacacagattctatttcacgaagattatagcaagcctcataaataatgcatattgattaagaggcttgctatagtataaaatacggctgactatatccgcatttaacccggatatagtcagccgtatttttatactctgtttttatatttatgtcgaaccgataagctcatttgctttgctgttcacttgcgttggtcgaacccatttctgtcttacttaagtatttatttatcctcatgatgcttatgatgttcatgccgtttatgatgtttttcctctgatttatgatgatggtgtccatgcctatgtttctcatttccgcacacttcacatcctacttcaatcttaccctgtgtatcctcatcccaggtaccataagaaaccatcggcgtatccttcataatgcacagactgatggtctgataaagaataataccacccattttggctctgtatacaaacagttcacgtccaaaataatcgcagattcttcccagtacttcgccttctttaaatgtctcaccgggctgtttcgccggataccagcagcctgataccggggcatcttcataaatcacaggacttacttctatcggtggtttgccatgaatatgagacttcccacgaaggattcccagatgtctgaggatattcttcacatcatgaacatcctccgctaccagatcttcgcaccagcgggaactatgtccacgttccagcaggatactcgggattcccatgcttccggcgtagttgtaggctccacctgttccacacatggaagttaccagatagtccacatgtgcgatttccgccatctcccggctctttgcggctacttccgaagctgctgcacctgtacagtatacataagataccagaccttcaaatccgtcaccgcaatgcagatccacatagtaatctgccttctggaaaaattctgtcacaaccgtataagcaatcctgtcactgagcgtcccgtttggatttccaggaaaaaccctgttcaggttttttccatcctcataggtaagactcatagtacggtgctcaaatcctgtcctgttcatcagacggattacaatgatatttcctgcgattttcttcggatccagttcatctgcaagctgcatggcagcctgaatccctacatattctgcattatgcacgccgccggaaataagaaccgttccgccttctttctctccacagatcagtgttaccgggattccgaattctgcgccaataacatgcacatatccggatactttctcacccggcttcgcctccagatctgctacccgtaatgtcctcatttgcttattcctcatcaaagatacgcgctttcgcatcttctacagaataactctctgtcagttctttgaacttctcaggtgcagcactgtcatcaaataccttaatcacgccctgaagatcatcacagctatacgcattttcatagatacctgttgcatatccataaagctcttcataatctttctcatttgttgcagtccagaagccctggtacagacgtgctgcctgtccgttctcttttactgcatccggatttcctgtgatggcattgtagatcatggcaaatgcaggacctgccagagatgcatattttccctgtacataatcaacaggtggatttccgaacatatctttcttctggaagctttcataatttccatcagtgaaactgtcgatagagcctaccagaatattgctgttctgttctttctccttatctgcgattttatccaaataagtggaaacatggaacgcactcatcagcgcatcacagtttccatctgcaaatgcagtgctcagattttcaagtcccggtccgtcctgctctgtgtatcccggacagatcgtaacctgtacagaaccatcttcactggaaagctttgtaacttcttctgttgtagaaagtgtttctgcctcttctgtcagaaccagccctgctttctcttccaatgtattgagcattccccaggttctcacctgatgcaggcggtttcctgaagaagcaccaccggacatgatcacaaaattcttcgcacccttatccagaaaatactctgtcatatcgcatccgctctggtacacatcttccagctttggtcccacgcttcccatataatagggattatcttttactgcttcataattctcatcgctgatagtgttggaaccaagtgcataatacatctcttccttttcacattcctcaatgatatcctgaattcctgaagcaaatccgccgaaagaaatgattccttctgcgccctgctctttcattttatcaatatactgaatctcatcctctgcgctggttgtcttgccggagaaaatgaatttcacaggaaaacctgcctgaatatagtcgcggtagtagtcagagaacatttccatctctgaggcatccggatcatatacgacgacaccaattgtatgcacctctccatctgcataggtttcagtggcagcccaggcaggggttgtaactccaagcgcaagaaccgcactcagtgtcagactgataaactttcttctcattacaccttccccctttccttcaatttttcagatgctcctccacatagaaacaagctgcttcatgtccgggagcaatctctttcagcttcggcatctctgccttacatctgtctgtgcaatgctcacagcggttctggaaaggacaacccttgggtacatccagaggacttggtgcttcactctcgatactttggatcttctggctgggatccatatgaatggagaactgtgcacccagaagtgcctgtgtatatggatgcactgcatactctgtaacatcttcacctggaataacctctacgatatttcccagatacataacagcgatctgatgggcaaaagagcggatcagcgccaggtcatggcagatgaaaagcatgctgatatttttttctttctgaaggcgtaccagaagctcgatcacagattcctgtacagaaacatccagtgcagaagtcgcctcatcacaaaccagaatctccggttccagtgaaagcgctcttgcaatactgattctctgtctctgtccgccactcatgttgtgaggataacgatctacgaaatctccaggcagctctaccatttccagcagttctcttgctttggcttctttctcgcttttctttaattttccgaagttgatcagcggctctgtaaggatatccacgatcttcatcttcggatcaaaggatgccagcggatcctggaaaaccatctgcatgttctggcgatttaaccatgtttcctttttggaaaggccagcaaggtttttgccatgatacagaatctcaccgctggtaggcttgtcaagggagataaccatccttacgaatgtggatttaccgcatccgctctctcctacaattcctaatgtcttgcccttatagacattcaggttaatgtcattgcaggctgtcagtgtccgtccatgggaggccggaaactgttttacaatgtgctttgcactgagtacgatatctgattccttaaacaaaacggcgtccctccatttccggtactgctgccagaagcttctttgtataatcactggtcggatgattcatgacctcatcccttgttccctgatccaccactttgccgttctgcataacgatcagctgatctgccatgtaagcagctacaccaatgttatgggttacgatgatgatgcctgtgtggaaatcgtcacgcagctccatcatctgacgaacaatctgtgcctgtgtagtcacatccaatgcactggtgggttcgtctgccagaagcagttcaggattaaaggtcattgccatggcaatacccacacgctgacgcataccaccggaaagctgatgaggataactgttcatgatattctctgcttccgggagacgcattttctccagcatgcttactccttttttccacgcttcatcttttgacacttttgaatgagtacagatgtattccacgaactggcttccaatcttacggatcggattcagggttccgccgcagtcctgaaagatcatggatatacgtgttcctcttaactgtctccattcatccttggtattggtcagcagggattttccgttaaagagaatatctccctgtgttaccttaccgcccccggcaagtgcgccgaggacagctctgataacagtggtctttccgcttccactctcacctacaacactgatgatctcacccttcttcatattcaggttgaaatgctcaatcgtaggttcctgctttccataccggactgaaagatcctttatttcaagcataaataacgctccttcttacttgttactgtgtttccggattatatccatgtccatcttttctgatatcccgacgaacagacataatccgtgcagtctcattcagaaattatagcagtcctcgtaaataatgcatttaagacagttcagcagagtacgaaagacaaggaagatatctgcaggcgtgccgacgcacggcaaagatatctgacgcaggatttcatactctgatgggctggattaatatgcattattttagaggattgctataatatctctaaatataattactcagcaagtgtgatgtcttttgtcagccagtagtaatccatgggatacatcttcacgcctgtaactctcttgttggagaacagataagttgtctcatatccgaagaatacagttgctgcatcatccatgatatcctgctggatcttgatgatcaggtcttttctttcttcttcgtcaaatgttcctgcaagctcatcaagaagttcatctacttccggattgttgtatcctgctgtgttgtttgcagatttgctgtaccagttctctcttaaatagttctccgggtctcctgtattagctacaagtacgttccagataagaaggtcatactgaccggaatctctcatgtcgagaagtgtttcatagcttactgtattcaggtttacattgataccaatctctttcaggctggcctgtgctgcctgtgcgtaaacaccaagttctgcacggcttgtatagataacgaaatcaagtgtcagaggatctccgtccggtgtttccacgaatccgtcaccgtctgtgtctttgtatcctgcttcctcaaggattgctttcgcaccttccggatcatagctgttctcgtcgttcagatcatcaaatccgaagtcaagtgtaggaggtaccggtgctttacctgctgtagctccaccttcaagaagaacatcacagtatgtctgtttgtcaagtccgcgcagaagtgcctgacgaagcgctttatcgctgagtgcacggccttcactctggttcataaatgcatatgtggaacgcagggactgaagctcctggatctcataattgtcatttccttcaaactcaataaggttctctgtctttaagttataagcaatatcgatctcgcctgtctgaagagccatggaacgtgttgtctgatcatctacacatttcagtgtaaccttatccagcggcacctctccatcccagtaattctcattttttgtaactacacaggaatctgtagggctgaaagattctaccttatatggtcctgtacagatcggtccttccattgcaaatgtagaatcatctacgtttgtatctacgatcaggaataatgggtctgcaaggcttcctgccatgtttgcgtttgctctgtttaagtggaagatcaggttctgtccgtctacttccatgctgtccagatcaaagaactccggtactcggtcactcttgtcaactgtacgctgaatagatgccattaccatctccggtgtcatatcatcaccgttggagaatttaacgccttcacgaatcttgaatgtccatgtttttccgtcttcgctgttctcccagctttctgccagacaaggaacgatctcaccttcttcatcgaatttagtaaggcactcaccgatagcataacgggaaacaacccagctgaagtactgctctgtaggctccagagtatcagcaaagcttgttacaccgatggtgatctcttttgcatctgctgcgtgagttacggttgccatggaaaatgtcattgtacatgcaagtgctactgctaaaacttttttgaataatgtgtttttcatatattcctcctgaaaaaattaggtaagtgggattcatttccactttatagttaatcatttatcatcattacttgtgcagaagtccgattgctgtctgcactggttgattgttactctatcttaccttatcttctgcggttcagtacggaagccgcagaactttttatacccggcatttttttaccatgcggatatatttgagctttccttattatataagaaacaacagcctgctttcttactcctgtctcggatcgagaacgtcacggatgctgtcaccaagcatgttgaagataactacgcagatcacgatcgcaatacctgggtagatcatcagccatggtgcttttgccatgtaagttcttccctcgttcagcatcagtccccattccggtgtgggcgctgtagcaccaaagccaaggaaggataaggatgccagttccagcatcatggttccgatatctgctgctgcagttactaccatctgagtaaccatgttcggaagaacatgtaccagcagaatcttccatgtcctggttccgtttacaactgctgcttcaatataaagattctttttaaccctcagcaccatacttcgtgcaagtctggcatattttgtccagcttaccgctgcaatggagataaccgcatttacaaggttcggtcccagcataccggcgattgcgatggcaagtaccagaccagggaaagagatcatcatatctgcgatacgcatgatcacaccgtctacgattccaccgaagtatccggcgataattccaagaaatgtaccgatcacaaagataactgctaccagacataatgtcatgaccagagaagttctggttccgaagatcactcgtgataacaggtcacgtcccagcttgtctgttccaaagggatgtgcagaacttggcgcctgaagggattccagcattactgcatccagcgggtcgtagggtgcaatctgcggggcaaacacagctacaccgactaccaccagcgccagtatcgaaaaaagggtaaactgcttattttctttaaatactttcgctaacttcattatctatcctccttaagtcttggatccagataagtataggacagatccacaagcagattgatacacatatacaggatagcgatccacagtacatatccctgaaccagcggataatcgcgacaggagattgctttgactgccatatttcccatacccggccagttgtagataatctcaacgactgcagtaccgccaagaagacttcccagggaaagtccaagcagagttaccaacggaagcattacatttggaagaacatgtctccataaaatcacactctccttgatacctctcatacgtgcacctgttacataatcctgatgaagctcctccagaaccgcacttctcacctgtctggtatatttggcagacatggcaagcgccaacgtaagtgacggcaggatcatagccttcagatcagtacttcctcctgctacatttacccagcgaagctgtacaccaaaaatactcagtaagatcaggccaagccagaagcttggtactgataccccgataaaagtaattcctcttacaaagtaatccgggaatttgttctgatacactgctgccaggattcccagcggaatggaaatcacgatcatcataagcagtgccagcagagacatcttcagggttggccagaaacaggatacaagtttctgtactaccggcatcttaaaggaataggactgtcccatatctccggtgagtacacccttcagccaggttccatactgcacaagaaagggctgatcaagtcccagctcatgccttgtttgttccagaagctccggtgtgggaagattaccgcactctgtcagcatgatctcagccggatcaccaggagacagataagtcagtccaaaggtcagaaagctgataccaaacaggacgatcagaatctgcagaaatcttttcccgatttgttttttcgtcaaaataatctccttcctacatctttcgtgaattaaaccaataccggaaatgtttctgattacttttactcagtaacatggggaatccccccataggggttaattttcaggcaaaaaaatagcccgcaatatgaaaacatcatacatacggacacaaaatgacataaaaaaattatgcttcctatctaccgtaagaatcattcctatcccaattgcaagcagttctcctgacttaagttcatcacttcgaaatcgccttcccggaccaactttaaaatcacatggcccagtgacatttttcattccgaagctccctcttacagtgacgggatcgtaccggacttacaccggtttctctattaatccttgcggaacttacaacgactggttcaaaaccaataaatgttatttaatttttactataatattatagaatatttttttttactttgtccagtaattagcaaaaaaaatcagattgtattcaaaaacatacaatccgatttttttattccttttactgtaacagataaacgaatcatttttattcttcaatattatttgctaaaaagataatttttcccttcgttataagttcccttcattgaaagtcgaacagctaatttcccagtcatcggatcttcaatacctatactgatcttatatttctttccggccagtgagatcatcttttttacctgcattcttgtttttgtctgtaaagtttcttccggcagaagtgattttaacgaaatgtcaaccgcttctttttcaagactatttccatcctcatcttctaccagaacccatacaggccagtcttcataaaatggtgcaactccatcattcttccatttaagattcaggctgacataacccggcatctgaataaggcttgcttccgagatccacaaacgatatcccatgcttcctaaaactttcctataaccgttttcataagttttatctgctattttcggtccaagaaaagtagtatgtgctttctttatcagatttattgtctgattcagatttgtgtcaagcagctctttcattgtaattgaacttgtaaactcacctccggaaggaaactttttccagaaatctttcattgcggataaaccttttttctcatgagtctggtcaaactcaccgccttcattgatccagcgaaaccattcctctgtgctctctggctgtccggtcatatcgttgtagagacctgttccataatgttctccctcactaaaaggtcttctcatcagtatcatggaatcagggaaggcctctgtccatggaatcatataacgttctcttacagattcttccggcagactctgtattcctgcggaaatatttacatgccattctccccagtgccccagacttccaagttcgatataactgaccagtccatctctgccaaaatgctctccaagtgcattaactgcccttttgtgatattgtatcatctgttcattattataatcaggagcatatccctttccatactccatatcataccaggttcccgcatgatcagttttgtcatatagccattgtggaatgtccatatgcttttcctccccgggaatatcacacacaaacctcagtaccaggtgtttcccttcttctctccatctgtcagtctgattttctctttcgattttctcccagtcatattttccttccgccggttccagttcagcccaggtaatatccatatacagtaaagatatatcctctcctattgtttcttcccaggcacaaggtgcatatcccattaatggatttccaaaaatttcttctgttttttcatatatctgagtttttcttccaaataccatccatactcctgctgctataataactaaaagtccaaaacccaacagaaccagatatcgtttctgacttttagccatgatattctccattatactgaatcaatgtaacatcttccactccaccgatatcccggattttttccataaactccatatcattctgtctgcaatatatttccactgccatttctgttttttcattgcgcatagtttttgattttacgaaatattttctttttccaaaacagcggataatttcatctcccgcctgagttccatgataatgaatcactgcaatataaattctgccattttgttgtttgtgataaaacagggtgattatcagaatgataatcacagctgtcaacagagttaatgcatacatacctgcgccggctgtaatccccgatgtgattgcccagaacagatacagaagatccatcggatctttaattgctgtacgaaaacgtacaatagacaatgcaccaaccataccaagagaaatcacaatattgctgctgatcgcaagtgttaccatacaggtaagcactgtcattcccacaagtgtaactgcaaaacttctggagaaaataactccaacataaaatttctgataaaccagataaatcacacttcccaaaatcaaagccactgccagagcagccaatatcttaggtatatcatactgactgaacattcctgattccagtacagatttttttatcatatcctgtacactcatcttatcatcctcccctgtgtatcataccaatactcaaatccattcatgtaccgcgttttttcataacacagtacatatttggaaactgctgtaaattctgctgcctgcggcggcagaagatttctcagaatctgaggcagcatctctgtaaatttcacttccatgatcagttttcccggttccagtacagataaagccggaagcgtactgtcgaaaatatcatagcttccaacagcagctctgacatctgtatcaaatgtgatcctgaccgttccttcatccatgatccatggttctctctcataatctacgattgttctcggccgcatcatattactcatacattctatgtaaaattccctgcaaagactatacggacttttcagaagaaattcatactcgccggaaagaattttttgcacctcatcttttgtcagaggggcatcttctttataaatataactgccgaacttcttttttctttccagcttgatactttcagcactataattataaattcgtatcctatatttcttcctcataagaacgccgctttccttttcttcatatgcactgttccagtaatcatcaaaatacaggctccgtatcagatatcctccattttctgcatgaggatccagtttcataagtggcttcatccgaagattcaggacttctttctcactggtactgataagatatttccattcattacgaaaatgttctttcttcctgtcagccttcttcataattgtcttcctctaccgtactatcttctgttatgtaaaagcacttcataccataatgctttccttcgtctgttacataataatcaaatgcatcctgcgtttttccagatgtatttgttgctcttattctcacaaagtactgtcctgcttccggaaggtccatctcagtttccggaacagtcagggttgtattgtgatagattacatcctgaaacagataatctcgcgcaacctccacagaatacgtaatgtcctctgcgtccagatcataagatacatcccagttaaatttcaacttattaccgtctattgtcggaacacctatataaaatggcattggtgtttccaggctttccagatataacttatagttcttctctatctcatcaggaagtgatgctacaatctgatcgtattgttcagatgtaagcggttcatactctgcatcaggcatcgaatataaatagggcttcagtacgttcttatagctctctatctttgatatgagcatatctttgttcagatattccctcagttccagaatggcatcatttaatttttcccggaaagaccgtgacttcagacacctttgaaacagaacatttccccagtaattactgattcccttttcccaactgccctgatccgaaaaattctttaattcatattccgatctcatcagacagccatcgttatcccaggcaataaagtaccagatatctgaattcagaggactgtataaataaacatttctgttctgtgtgtctacgtttcccatcagaatctgaaatgccatccagtaaacaatattttcttcatcaaaatgttctttcagtacatcttcaatccctatagagtaatcattcagatctgtcagcatatcgatcaatttggtatgatctgaatccccttttatttccagcattttttcaaaggctgttttatcatatcctgcatcatcttctttttttataatatcttcgtaacgatagaattcaaaagaattaatcttatacaattgtccgtttgaatccagtccatgactctttaatgctgtcttattcagttgttcaacctgtgtataaattccataatcctcaaattttccatctgattcttctgtattatcctttacatacaaatgcacaaactgtgtacgtaaaccaaccatctgaggaattcccctaatcagatcatatgccagcttatttcgaaagcgcattccttctgtcatatgtttattcaggttaatggttctctgtcctctccacgttcctttattcttttttaactcaattttataatttttttgtgcattctggctggatgtctggcctctgatctgaacagttgcattaggcacgctttctccatatccgacttccccttctatcggtccattctcatctcccacctgtaaaagtcctgccacctgatatctctccactcccacatcttcgtagtcataaacagaatagctgttgatttccttccatgtatgatatgtattttcggatgaatttcccttagatacagtaagatacatggtaacaacactggtatcatcagcattttcatacaaagaatccttatctcttaaatgcatctcattgatttcttctttctctgctttttctgtctttacctgttctgtttcgttatcttcctgtactgcctgatcctgcgaagagtttcccgctttttccagagtgcagcctccacagagagaaaggctgactaatactgcacttatcagatttatttttttaattcctgtcaacgttcgttctcctttccagtttctcatccataaaacatccgattctggtaaatacccccgatttgtcttctgctaccaccggctgtatgctgagaatataatatggcagacgtctggtataacgttccagacggatcataactataaaataaaacagtacacatcctgccagaaacccaaagccataatatacctgcggacaaaacaatgaaattacagtaaacacagaagttcccacggcaaaaattacagaagcagccaacgctcccctgtaatctgtaaaatataaaagaagcagaagcatcgtatttgcaactgcataaatgccgtacccaacacaaagtgtccggaaatatccatacatcagatcattaaatcccaaaggaaggtacttcaaaagactctcacccactgaaatcgccagtgcagtagtcagtaactgcttcaaagcggtatatttcaattctctgttcagtacatccagcatttctgtaccagcctgcataatatccttaatggttcccccatcattaaataaactgtaatagttcctgtatttcggataaaaattaacttctacagaaaccacaaaatttacagtggtaatcagaattgtcagaaatgcaatcaatgccggtacgtcatgagacggtgccccataaaaaagcccttttacctgtttccccagcggtccggcccacatgatcacaagatgggcaaacagcccgatattaatgcagagtcctgtaaatgccagaggcagaaactcatctgcccatcttaaaaataagaatgcactgatatcactttgcggaaaatactcatacagcaaaacaacatcccataaaagcatgatcccatatccaatgcataccgcagccatcaatgcctccacatgagaaattcccagaaacagcaataaggctcccgagagaaaagtaacagcgattgcagcaagaaaggataacataattcctctgtaatctttaattgcagtaagataactcattgcattccatgtaacgatcagttctccaaacagcccaaaacataaaaacttatctataagcccaactccggaaaatatcagaaaaatcccatatagaattcctcctgcaatgagcattaagcctgtcgaaccccagaaagatgacagaacagcctcatttttttcttcataaagcatatctgcaataaatcttgttactaccattgataagaaactggttaccgtcaatgatgcaagaagtgtatatgtgatcatgcagaccagtaattctctgctctgtttcgaagcgcctgtcctgtcacacaaaaacataacccccagcagaagtacgataccaagcagcatgggaccggtacagataatccctgcatatccataggcgcggaaagaagcaaacatccctcttctgctgaacagttttttgagttcaaatccaatccctgccatatgcttcctctacctccctgtaaagttttctgtattcactgatcatgcgctcatgcctgtaatatgccttagttcttgcctgtccgctttttcccatcctgatccgccttctcctggattcacacattttttccatagcggcagcaagtccatccctgtacatgggcggaacacaataaccggcacatccaaaattatctccttcttttccattcagaagttcccggcagcaccctacatcagtcgttacacatgggcgtctggctgcaaatgactccagcactgataagggttgtccttctgatatactggtaaggatcgtaaaatccagttttctcatatactgtacaatatctacccttccggtaaagacaaggttcctgatatccagctgcttcaccagagcataacactcatctgcatattcctcgtcatctacccctcccagaatatgaagtctcacattctccattctggatgaaagttcataaaatgcatatatcatagtctttatatctttaatgggtgcgagacggactaccgcacctatgtctacccatccatcttcctctttcaaaggaatctgtgacaacctgtcataattaataccattttcaattactctgcatttctctgcatcacagccaatctgtatttgcgtaagcatcgcattcgtaaataaactggttacccgaaaagcccttttataaattgcttctgataacatataaaagaaagaaatccactgttttttaaatgatgggattacccattttgccctgatgatctcttcctctctttctcttgtgtatatcccatgctctgtaagtaataccggtctcctgtaaacatatcctccaaggcaggcaagaagtcccccatatcctgttgaaatggcatgataggtatctgccagaggaacctctgaacccagaagatataaaaccggaagcagcatggaacgcattgtatgaaacgcatccgcaaatgcaatatacggatatttttccagacagctctctgttaatatatttaaaaactgctcacttttcagaaatgacatcggattcattttccggtcgtgatataaatgaaacaatacttcccagtcaggatgactgcattccatcaattctcttagactctttgtttcttcttccgaaaaacgattgattctgtgcagctgtcctttttgatttccatgttccttcagttttaatgcatcatccagaaatacctcatggacttccaccacattatccggcagttcatagacaaattttccacggtcacatgcatgtgctcctatcacccacagtacaaactcatgctctttcataacagtgatatactgatgcatccatgtagaaactccaccatgtacatacggataacagccttctaaaaccagacagattctcaattctctcaccttatttctattttcactgatttctcttttgcccgaagcagatagagatttccggtaatatgcgtcagttctccaccttctatattacccggagtcccttcattcattcttatcataatataagcttcatcataaaaattatctaatttaagattaagttcctgatctgatatatccttatcgatcaccagcgccccataccgctgtattgcgcctgatagttcggaagcagtaagatttctcagacatggagctgaagtatacagccagtccatatattcatccagccgttttttcagtttcttccatcccagtctggcacctctgtcttcgtccagcagatcatccggatgcataaaatgtgtattgacaaaatgcatattcagttcagatatagccgcaagttccatataatcatcaatcacagcacctgaaataatacggggttgttccacaattccatcttctgcaacttcaaactcctgtgtatatgccatatctccgacaaaataattacttgcaattgtacgtatctccggaaattcttttacgatcatttcccgcccttcatctgacagcacattagacggcggtacataaacagacaactctgtccccggaaacatctcttttccaaaccgtatcagctctgtcatggcttttttcattgcatcataactttcccatgttttatatggaaggatatttgcataatccacatttgacaggctcaatggctgatgattatatccatgatatcccagttctcctccctgatgaagcagcatattcccaaaatactgaaatctctgcacatcttcctgttccacaacatctccggacacatcatcctcataattatcaataataacacctgtatatttcacgccgtgttcctctgccatatccagcatatccggccaccagatatttgtataaaactctttgatgctgagaccataatcacgtttgatatatgttccgtctccactcggcacaggagatggaaaatcatccagataaaatacagatccattaagcactggatagaccatcacatctgtcagcaggctataggatgccgcaaagaatcctcttgtggctttttcacataatccaaaattgtcaactacaaatttaccttttccataactgttttcccagataagcggaaccttcttttcatcatctgcccatgcataaaccttcgctgtttctccaacacttacttcccatgctgaatcatatgcgtccggaatctggtaagatcttccccctccaatcatgaaatcatcatcaatatagattttatctaccagaacatttccataatcagagtctgtaattcccaatttctgctcaatgatcgaaacatatgtatccttctgaagtgttaacgcaaaaagaacactacctccactttctacccagtttccaatctttataactgtatcctttaacggattcagatccgacatcagtactactattgtttcataacctgaaaaatcaggaacttcattttttctgacatctatcatatccgctcctgttttcatatccatgaaaattctttcaaattgttcccatgcttccacactgtctgcctgactgctgtccatcagcaccagacaactgctctcaatatttttgactgcctgtgtttcagttacaaccgtatccctgtccagatatgcattcttcttaacatctgcctgatactgaattcctgaacgctctgtccaaagcaccacactgattgccagaaaaactcccagaataacagtcagacccttaaatcgaaaagactgtaaatattttatcattcctgccaaaaagccaatgcctcctttcctttcgccgacaggtaaatatgttcctgctgaatctgctctaatgtttcctttaattcttttccctgtttcagttctacgtaatatctgatcctgagtatccagtattcttcatttctgtgccacttcttatccatcctttccagactttcaagcacctgttcatactccttcatctgcatttgattctcagccagacatacatatgtatgaagatcctctttaaatttcagttttttcttcagaagttttatatattgatttctttgcaccagttccatctgtccttccagaagtccctgagataaatactcctgaagaaaatcacagtactctgaaataagctgttgattttccggttcttttgcatatctgtattctatcttctgcagtctgctttcatattccttagacagctctaccattcctgtgatcgcataatgcacaacctctacatcgtcattcatccttgcctgtttaagcatatcgatgtaattctccggatcatcattcaatatgttcataatcagatcacgcctcatatcggcctcatcaataagaagcacttcctccagtggcacaatatttctgtcactttcttctttcggtgctataatgcttctgtaaatttcttcattgatcttcattttttctattccgatttcacgctttttatcctggtgaaaaaatatctggaaatgcagaagcaatacacagatcataccccataccggtacaaagatcacaggtaatatgagatacctcttcaccttcagtaaatgggagtttattcctgtccatactaaaacacaacagataatatggaatataataaaaacaacccctgttatattctgtatcattcttcagctaccctgctttcgttacgggtgtcaatcactctgcaatgaagtccgttcttttcgagcctttcaattactatcggtaacatggcatcatccacctgtgacagtatcagatagagttgtccatcctccgatattcccagtatgtcattctctcggattttattttttaatatcctgtctgtttcctccagtgtcatttccggattttcaatctgcagcagagcatatgatcctattttctgttcttttatggaatgaaataacttcagcctttccataaaatactctgtttttaatatatgagttccttccacatattccctgtctctgactgcttcctgatattccagtgcacgcagcagagagacttctaccagaccacataaaattttgataagattcagataatacaatgtcatctgattactggctgcatcctgaataaataccagcattacaagttctccatttctctttatccctgcaatatatgccggatatccggcaagcagttccctgttcctccagacctcacccttttccagcgtttctatcgcattctgatactcttcaacccttatagaatttggcatttttctgcgaatttcaggtgatgacatttccatccttccaaaacgtttccatgaatccagtgaataaagtacaattgtatgattttccagaatatcttccattacccttatggtttccataaacagtttctgtggctgtatcacatccagctttcttgttatatcaaaaatttttccaaagctgtccctgcttccgagaatctgcttcttatattgtcttttatcctgaagcgtctcctgatacatttcctgcataaagaaaaatttttccttgatcagtctgttttcttttgttacaaattctatatcctctttattcttcagccttatataaccacagacagcacctgcggcaaaataaaaaataaatggaatccagttagaagcctcataaaacaaagtatatatgtttacattctcctgcctgtatgctgcaatcaaagaacaggtttccaacacagctgctgatattccataattaattccataaagacttcccatgaatacaataaatacaagtctcaggtcaatcattttaaactgggcataagttcctgtatatctgtttaaaaattcaaataaaataaatcctgaaagcaattccagaatatgaaccagcaaagtatttttcgatatccaattcctgatatttgcaaaatgtccggaatctgaatctgataattttttatactcctgatacatcccgggaatatcttcaaaaacagatatctttggaaaccacccatattcatatcttatgatctgatcatccggctgtaccttataaatctggccgctgttctggtagcttacatccagcctaccgggaattgtttttctgatttctttttccagatcactgaaactctgcccgaaacaatccggaacattcagacagtattcttttccccaattatcatatactttataaagcagttctgccagatcatccatacacaggaaataaatattttgttccggcgattcctcaaaaacaatttttccgctttgttctgcctctgtaaacagcttataaaaaaaatcctgtgtgtataccgctgaatataaatgaggaattctcagaatcttggtgtttatctgatacatatttccatattccataactacattttctgctgcggataccagaagtgtttttccacttgtaatattataaatgctctcctggccggtcagatacaacatctttatttccttattctttttgcataactgaagtatctgtctcagttgttccagttctccagtcatccttccatgcatggtcagataatttgaaaaataaacaattctttcaaactcatatgtttcgaaaatctctttcagttctttctcatcttttatgaacggacgagataatatattcttttttcgatttgatttcagcatctcatttcccagtacaactacatcacattcaggaaatgattcttctataaaagtttctgttacatatcctgtatttcctgccaacaatacttccatatttattcacctcaataaagtgaagtataacaaagttattttttcttttcaatatcagcatctttacagaaaatagcttttttctcaacaactgttgtcttgttcctgctgctgttctatgctaaaatatttccagtataaaatcataaaccacagacagatcagtaccctgacatttccggtactgatcatatctgatcatattatacaaactgtcaggaaagaggcgattacattgaacattgaagattcctgtatttcctgcattgacacagactggtcctaccagcttgccagacgcatggaaaaagagaaaacaaaccctgttctgggctatcgtactgcaggttccgctgcagaaacagctacaggagatatgttatacagggaaatgaaagctatcggacttaccgatgtaaccagagatacattctcactggacggatgggaattcgagaaggcagtcctgaaatttacagatgatgacgggcaggaacacacctttcagatgggcggatatcagacaaatttcgagacagacggatttgaagattacgaactcgtttatctgggaaaaggaactgccgcagattatgaaggcataaacgtaaaaggaaagctagttatggttgagatcaaccagcgagacgaatggtggatcagcttccctgtttatcaggcttatctgcgtggcgctgctgccctgatcgcagttcaggcaaacggctacggagaaatcgcagagtctgcgctgaatgcacaggatatcgcaggtcctgatttcgcacctgcattctctctgtctcaggcagatgcacgtatcctgaagcgttctctccgaaataaaatttccgcctgcgaagacaacaccactgattcagaagatacccataacactccggaacaggatgctgctttattacgcagatcctcattaaaagtatcactggatgcccgttccagagtgattccggacacaacagcaggcaatatcacaggtaaaatacaggggactgagacagactctatgatcctgctgtccgcacactatgattcctatttcgatggattccaggacgataatgcggcagtcgccatgatgctcggcattgcccgttcacttgtaaagggcggctataagcctgcccacactctcgttttctgcgcaatggctgccgaggaatggggaatcattgattccaaatacgactggtctacaggagcctacaatcaggtattccgcgtacatcctgactggcagggtaaagtgatcgcagacctgaactttgaacttcctgcacacgcacacaatagacaggatgccatccgctgtacctatgaatatgcagatttcatcagacagtttacagacagcctgactgtcccgaaggaagcatatcctgacgggatcacggttctctctcccatcgagacatggtctgatgatttctccatggcaatcgcaggtatcccatccacagtcaatgatttcagcgccgggcccttcatgcagaattattatcattcccaatatgataatcaggatgtttaccaggaagctgtctatcagtttcatcatgaatgctatctgaaactgatcatggccattgacagacttgtcctgccaccgatgaatttcagcaacaccatgaacgcagtcgcagaaagtatccacgaaaatgcactctcatttgctgatcctgagcagaatgttctgctcagaaacctgcagacaattatcgattcggccgaaaatatttatgacaaaatctgccagattaatgcggaatatgccacactttcagactccgacgcccgcattgctttccgccacaaatgggaatatgccggactggagctgctgaaaactttccgcaaggcacaagactatctggtacgtctcaactggcaagatgaagtaattttcccacaggaagctgcctccaaaaatatccgacagctggaaaaagccagccgggctttatccgagggaaatattacagatgcattgaaggctctctatcgagtagacaataatatgtacgcatttctcttcgatgaagaagtttactatcacttcaccgaatacattcttcaccagccaaaagaccgcctgatgtggggtgccggacgtatcatgcatcacgaaaatctctacgggattgtgcagaaactgaagcagcgcatggaagaagaaacaccggaactcgacagtgagatccgtcgtctggaagctgccctgcgcagacagaaggcttattataaggacgatatccgctacttaaacacctccgttaataagctgtctgcgatgttggataacatctataataatctactgtctttttaaaaaacattaccactcccgggaacagcaatgttcccggcaataaataaggagattactacataccatggaaagtgataatttgtacagagtacaggaagaagatttaccacgattacagaaactgttaacagtctgtttcgcacaggatccgctgtatcataccctgattcctgatgatgacaccagagaaagacttctgccggagctcttttcctgcgatctgacagagttctttcagacatgcgaaatttattctgacagcagcgaactgaacagtatcctggttgtttctgacgaaagcgaaccttacaattttctgcactactgtctcacagaggccagagctgcacttaccactgacggatggctgatcaaagaagatccaagcctgaaaaccttctggaatttcattcagggcaaagactacctgaactcaagctggactgatcagcttcaccagacagaacgtctccatgtgatctaccttgcggtagaccccggacaccagcatcatgggctggcagaacttctgatggatgaagtgataaattacgcccagaaacacaagatgctgatttctctggaaacccataatcccaataacgttcctatttatgaacacttcggatttaaaacatacgggatagtggaaaaacctcactttgatctgaaacaatattgcatgatccgagaggctactgtataatctgtatctgtactgctctcgcaattattaacataaaggctccgtaattgataaattaacctatttttcacttacatttttgtctatttctacgtctagtaatatttatacttttatattaaaatagcatacagatgtcggataaaacttttccacatctgtttgtttatagtaccatgtgtacttttccgctactattcttaattactgttaactgttcggagactttccattcaacggactgctgaacatccacgattaccagaaataaaagtatttacctggcaataaaaattttaataacccccagagtacacatcactacactgataaggaggacttataataatggtacgaaatgcaatgagcgcaacagaattttatattttacaatatttatggaccagagaaacacctgcaactttttctgagattatggttcactttaatgaggaagaaaagaaagcatggaagaaacagacagtaaacacatttctttcccgtctggcacagaagggctttttgaatattgacaagagcggaaaaagagctatctatattccatctgtcacctcaaagaaattctatgaaaattatgcccaggagattgtaaaggattcttacaacggagccatcaaagatttcatcgctgcatttacagcaggaaataaattaagcgcagctgagaaagctgaattattatcttatatccagacactttaatcagaaatgctcaataaaaaggctgtcattaacaacagccttttttatttacagaattactataaataccggatcagagaaattactcagactcttctatattttccaacgtaagcttatgatatggcgtgcgcacatattttccgtcgatcaacggaatatcactcttatctccatccgttgcgattacaaatgcaagattcaacatttcacgcgcctgcccctctttatcattataaaccgttccaagcatttcctcattctttacagcctcaatcccctcatctgtacggtcgaccagattgacacacaccacatcacatcctttatcgatcaggtttttcacctgttcattctgcgtcagctgactctgtgatgcatccaggatttccagattgattgccacaccgctggattcctcttgccaatgattttttcaggttatattttttctattgtgattttttcatattacttcctattacataatgttcggatcaaaaggtatttttcccctaacttgatacccacgaattactccgcactttgcagctcccgcaattttattatatgtttatatatacagcataaaagccactctacagattattcatccaaagagtggccatccttatttttatcagatacttatggtaagtatacccgtatattcatttttacgcaaaaaaaccagctaacagttagctggtttctcattgtaccttcaaaactacatacatgttgacatttccttgagattcattcttcctgcgattcttggtcaagccctcacccgattagtaacagtcagctccatgtgttgccacacttccacctctgccctatctacctcgtcgtcttcaagggggtttacttctttcgaatgggatatctcatcttaaggggggcttcacgcttagatgccttcagcgtttatcccttccgggcttggctactcggccgtagacttggcagtctaaccgatgcaccagcggcccgtccatcccggtcctctcgtactaaggacagctcctctcagatatcctacgcccacgccggatagggaccgaactgtctcacgacgttctgaacccagctcgcgtaccgctttaatgggcgaacagcccaacccttgggacctactacagccccaggatgcgatgagccgacatcgaggtgccaaaccactccgtcgatgtgaactcttgggagtgataagcctgttatccccagggtagcttttatccgttgagcgatggcattcccacttaataccaccggatcactaagccctactttcgtacctgctccacccgtcggtgtcgcagtcaagctcccttctgcctttgcactcttcgaatggtttccgtccattctgagggaacctttgggcgcctccgataccctttcggaggcgaccgccccagtcaaactccccgtctggcattgtcccaccgccgggtcacggcggctggttagaaacccaatactgcaagggtggtatcccaacagcggctccatggcaactggcgttaccatctcctagcctcccacctatcctgtacatgcaataccgagtcccagtaccagactggagtaaagctccatggggtctttccgtcctggcgcaggtaaccagcatcttcactggtacttcaatttcaccggatgcattgtcgagacagcgctcaaatcattacgcctttcgtgcgggtcggaacttacccgacaaggaatttcgctaccttaggaccgttatagttacggccgccgtttactggggcttaaattcaaagcttcgcgttaccgctaacctctcctcttaaccttccagcaccgggcaggcgtcagcccatatacctcacctttcggtttcgcatagacctgtgtttttgctaaacagttgcttgagcctattctctgcggcctggtttcccaggcaccccttatccctaagttacggggccattttgccgagttccttgacaatgcttcttccgccggccttaggattctctcctcatccacctgtgtcggtttacggtacgggtacggtataaacgatagcggcttttcttgacgcatggctcacggacttcgctactttatttcgctccgcatcacggattcccattgccacccggatttgcctaagtggctggtaccccgcttgcaccgggctttccattcccggcttccgctttccttacgtgtccccacagttctgtcataccgcagtacaggaatctccacctgttgtccatcggctacgactctcgtcctcgccttaggccccgacttacccagagcagatcagctttactctggaaaccttggatattcggccataaggattctcaccttattctcgctactcattccggcattctctcttccatgcagtccacagctccttacggtactgcttcttcccgcatgcaatgctcctctaccaacctttcggttccttagtttcggtggcgcgtttcagccccggacattttcggcgcaggacctctcgaccagtgagctattacgcactctttgaatggatggctgcttctgagccaacatcctggttgtcttcgaaatcccacatccttttccacttaacgcgcacttggggaccttaactgaaggtctgggctctttcccttttgaccgcccaacttatctcgtgcagtctgactcccgataatcgattacgcggcattcggagtttgatattcttcggtaggctttgacgccccctaggaaattcagtgctctacctccgcaaatctgtatcgaggctagccctaaagctatttcgaggagaaccagctatctccgggttcgattggaatttctcccctatccacacctcatccccacccttttcaacggatgtgggttcggtcctccactacctcttacggcagcttcaacctggacatggatagatcacccggtttcgggtctactcctactgacttaaggccctattaagacttggtttccctacggctccacacctgaagtgcttaaccttgccagtaagcgtaactcgccggaccgttctacaaaaagtacgcggtcgcacatataaagtgcttccacagcttgtagacacagggtttcaggttctctttcactcccctcccggggtccttttcacctttccttcacagtactatgcgctatcggtcactaagtagtatttagccttagggggtggtccccctgatttcccacaaggttccacgtgtctcgtggtactctggatcctgctcagtctcatcagctttcacgtacggggctttcaccctctccggccggctttcccaaaaccgttctgttagcttcaaagaatcttaaatgcagtccgtaaccccggaatgcacgcattccggtttaggctcctccgcgttcgctcgccgctacttacggaatcgagttttctttcttttcctccgggtacttagatgtttcagttccccgggttcccttccatacgttatggattggcgtatggatacatgaggtttgctcatgtgggtttccccattcagacatctccggatcacgggatatttgctcctccccgaagcttatcgcagcttatcacgtctttcatcggctcttagtgccaaggcatccgccctgtgcccttattgcttgacctttcgcttcatcaccctagcgtaggtgatgcggtcgtttgattctcattgtttgatatgtttttgttactgttgataacaattaatatcgatgtcttttcctatcttgcgttttatgagatactctcatatctcttaacgttttgtatcaaggatatttgattaacttttaatcaaatttcatgtatgcagttttcaaggtacatattgactgatgctttatcagtcattagaaacatcaaatattccgtcctatggacttcttatttaagatctctaatcactggtaaaaccagcatatcttaacagctcttcccggctgatacgggttagcaccggactttacgattcgtatctggctccatcctgtttccgacaggactcactttccaatgcctgttttatcttcatcaggcttccagcctgttgttttctttttgatctggcgcccacctgctctcccacaccgtctccagtgcagtaccatcggccgattgggtcttaaccgtcgtgttcgggatgggaacgggtgtgtcccccaaccgcatcggcaccagaaatgtttcagcttgatagctaaacagtaaaacacattgcaattttctacttcttcttccttagaaaggaggtgatccagccgcaccttccgatacggctaccttgttacgacttcaccccagtcatcggtcccgccttcggcagctccttctttgcagttaggtcactgacttcgggcgttactgactcccatggtgtgacgggcggtgtgtacaagacccgggaacgtattcaccgcggcattctgatccgcgattactagcgattccagcttcgtgtagtcgggttgcagactacagtccgaactgggacgttatttttgggatttgctccatctcacgatctcgcttccctttgtttacgccattgtagcacgtgtgtagcccaaatcataaggggcatgatgatttgacgtcatccccgccttcctccaggttatccctggcagtctccccagagtgcccaccttaaatgctggctactgaggataggggttgcgctcgttgcgggacttaacccaacatctcacgacacgagctgacgacaaccatgcaccacctgtctcgcctgtcccgaaggaaaaatccggttaaggatcggtcaggcggatgtcaagacttggtaaggttcttcgcgttgcttcgaattaaaccacatgctccaccgcttgtgcgggtccccgtcaattcctttgagtttcattcttgcgaacgtactccccaggtggaatacttactgcgtttgcgacggcaccgaagagctttgctccccgacacctagtattcatcgtttacggcgtggactaccagggtatctaatcctgtttgctccccacgctttcgagcctcaacgtcagttaccgtccagtaagccgccttcgccactggtgttcctcctaatatctacgcatttcaccgctacactaggaattccgcttacccctccggcactcaagtatgacagtttccaatgcagtccacaggttgagcccatgcctttcacatcagacttgccacaccgtctacgctccctttacacccagtaaatccggataacgcttgccccctacgtattaccgcggctgctggcacgtagttagccggggcttcttagtcaggtaccgtcactatcttccctgctgatagaagtttacataccgagatacttcttccttcacgcggcgtcgctgcatcagggtttcccccattgtgcaatattccccactgctgcctcccgtaggagtctgggccgtgtctcagtcccaatgtggccgttcaccctctcaggccggctatggatcgtcgccttggtgggccgttaccccaccaactagctaatccaacgcgggtccatcttataccaccggagtttttcacactgagccatgcagctctgtgcgcttatgcggtattagcagccatttctgactgttatccccctgtataaggcaggttacccacgcgttactcacccgtccgccactagaattaaattaaatcgaccgaagtttcaataaagtaattcccgttcgacttgcatgtgttaagcacgccgccagcgttcatcctgagccaggatcaaactctctgataaaatgtttgattcactcaagataacaactagctatctctcgttttactgtttttggtttttcaaaccgttcttaaaaatgtaaagaattttcgagaatcgtatgtgtttcactgtttagttatcaaggttgtctgtctcgcgacagcttgtttactttatcacatctctttttctttgtcaagcacttttttcaagtttttttcaaagtttttcgaactcttccggatttccggactgttcttctgatctgtgattgtcggctctgttcaagcgacttgattactttaacatattcgttttaagttgtcaagcacttttttaatttctttttttctttcagaaattatcttaaattatctcttttcaagaaacaattatttccgacagctcaactaatataacaccgaaagcagtccctgtcaacagttaatttcataatttgacaaactttttatattttcaccctaatctccactaaattcccaacagaaatccagtctatctgacaccggaattccaaccatcctccccatctatccttcctatattgcagcacccacataccatatatacacaacaccccagcttttccgtcccattcatactatatataggaaacttttctattctgccaaactaacagaccaccatcccgcttctctttcagccatctctgtcacagctaacagccagcaagctcaaatcattctcttcggcgacatttgcagggcctttagaaaaacttagccccgggaaatctgcgttattcgcagatcactcactgtctgagccgcttcgcggcgagtttgagttatctgtgaatgcttttagcagattttccggggcttagcttttcttaaggcccgaaaccgagccgaagagaatgatttgagcttgcgtccctcttacctgatcttcccgagcttagtttttcttaagacccgaagtcaagccgaagagaatgatttgagcttgcgtccctttcatctagaataaaacccactctcaacctccaccggaatcaccctctcctcaatcccctcaatctcaataaacctctgtctccccaacatctccaccatctgcgcaagcagctccctgctcccctgcgcctccatctccacgcggtcatcccagttatttctcacccaaccggtaacccccagagaactggcaatataacaggcccgatagcgaaatccaactccctgcactctccccgaaaaccaataatgcttccttatcagattctctctcatctccgaacccttcccatcctgaacatcatgctttttccagactccccggcctttctcatactcctcagcaatctcctcacctgtctcagaatcctgcagaaacgttctgtacttctttctcttaaaatcaaatatactcaacagcaaccctctctcacagctactgtgccggcaacttgatttcccgaacattctcacatctttcctgccagcctgtttcaggaatcactctgccgccacactacaatcacaccctgatcacaaatccgtcttttctcgctttcgctttcggatattccccggagcgataaccaagcacacaatgaccaattccaacataagactccggcacaccccactctgccttcaatgcctttccttcttcagaagcaaacacctctcttgcacgatgaatccagcaggaatcaacctcaagggcatgagcagcattcatcagatttcccataaccagacttccattttccacacatgtaggcatattactgtctgcaaagaccacaacaactgtcggtgccccatagaacggatcactctcagtccccatcacatccgcattcattttagaaagcttcgcaacaagttccggattctgtgttactaccataagtgtaccctgttgtcccattccgcttggtgcgtattcccctgcttcaagaatttcattcaacacttcttccggcaccagatcttctttataaccacgtacacttcttcgctccaaaagattttttattgtttcattcatgtctcatatcctcctgtatttattttcatcactatcaaagcaacattactgtccaccacgttctcagcaacacagtcaggcaacaatatcttcctatattatagcactacatctaccaaaactcacctgtatttcccataattttcaggcaattttccttgcccctgcatcacaactggtctataataaagagcagactaacatgaggtataaactatatgaacaaaaaagaaatttctgaaatcaagaaacagttcactcccgagaactgttctctcacccgcatctgcggatgttacgttgacggagaaaagaataaaaaaaccgaactgaaagaagcatttctctctttatcagaagaagaaatgttcaaatactttgaaattttccgcaaatccctttccggaacaataggaaaaaatctgatgaacatggaatttcctctcgagcaggaaactgagggtggaactcaacattttcttatgaaactgagagaaagcaaactgaccgatgatgcactggtagaaagtttctacgataagatcattgaaaactatgattatcccgaaaactactacatcatcctgatccatggagtatatgatatccccggaaagtcttccgacggtgcagaaatgtttgatgcatctgatgagatttatgagcacatcatgtgctgtatctgtcctgtaaaactctctaaggcaggtctttgctacaatgccgaaaccaacagcatccaggaccgtatccgcgactggatcgtggaacttccggatgttgctttccttttcccgcagtttaacgaccgcagcactgacatccatggtgtcctttattatagtaaaaatgcaaacgagcttcgggatatttttatcgatgaactgcttggatgtacagcacctctttctgcaggaggacagcgtgattcctttaacgcactggttgaagatactctgggcgacgactgcagatatgacactgtattaagcattcacgagaaattaaacgacctgatcgaatcacagaaggatgagccggaacctgtagttctgaccaaatctgaggtaaaacgcctctttgaagaatgcggcgtagaagatgaaaaactacagtcatttgatgaacaatacgagatcacagccggggaaaaatcctctctggttgcttccaacatcaccaatacaaaaagattcgagatcaaaaccccggatgttgtagtccacgtagatcctgaacgtgccgatcttgtggaaacactcgtaattgacggacgcaagtgccttgtgatcccaatggaaggcgaagttgaactgaacggaatccgcgtacatacaggaaatgaaaatccttctgatgacgaattttatgacaatacagatactgagacagaggagacatctgatggagaataatcgtaaactcttattttttgacattgacaaaaccctgttaaccccttacccatggacagttccggacagtgcgaaacaggctttaaaagaagcccgctataatggtcatctccttttcatcaattccggacgtacctatacaatgattccggaaatcattaaagaaatgggattcgacggctatgtatgcggatgcggcagccagatttatatgaatgaagagcttttgttttccagttctattccaaatccgctctgccgtaaaacaacagaattactgcgggaatgcagaattcctgcgttttttgaacgcccggataagattttatatgacagcagttcatgtgctgttcctgaaactgttcagaagctgaaagcagaagttatagtagaagatctggctctctacccgcccgaaacatacaaccattttacatttgacaagtttctggcttttccgtctgctgattctgatatggaaactttccgcaaatttacagatgaacattttctgtgtttcatacatgaagacaaggcctgggaactgactcagaaaaatctcagcaaagcaaccggaatccggtttctagcagaccgccttggggttccggtcaaagacacctatgcattcggcgacagcacgaacgatcttcttatgctgcagttcgccggaaacagcatcgcaatgggcaactcggatcccctgatcctgcctcactgcacttaccagacaaccaatatcgaagataacggaattgccaatgctttgaagcatttccatctcatttagcagaacatacaaaataacgtattatcatatctctatttatctgtgttatttttgcatatttaggagaatgatttcggatttatttaaacttaaaaacagctatgtgaaaacactcaggttttcatcatagctgttttaatttacaatactcaattcctatcagcaggctactgacagttcggattttcttatttagctgcttctgtcggtgttgcttccggtgtttcagtagtttctgctgcttcttcctctgccgcaggtgtctcagtcacatctgtatcttctgctgcaggtgtttctgtaactttctctgtttccggtgttggagttgcctcttctgtcacttcaggtgtcggtgtttccggaaccggagtaggagtcggtgccatgaaggtatgtttgtcagtgatcttaagtgtcttaatgactttcttaactgcctttacatctgcctcatccagccatttagcagttgtatctgtaaaataggtactttctttggaattctgaagagattctcgcttggaagctgtggcatcttcatcattgatcttgtcaagtcttactacatagtatcctgtgtcagtctcaataatattgtctgcaacttctccgtctttcagtcctctcagaaccttcaaaacctcatccggatatgcctcgctgccggaatcttcatcctcgtcttcgctctctttggttgtaaaattaccctgtactgcagaataactgtcatctacacccttggcaatctcactcatatctgctgtaggatcctctttcatcttatccagaatctcctgagcctgttctttcttagtctttttctcctcatcagttatatcatcaccgcttgtagagatacttacataagtgaaggttgtctgattcgcttcatcatcagaaactgtgatctttccttctgctacaaccggatcatacatctttttctgaattgtctgaagctccagaagtgtttttacctgatcttccgttaccgcaagttccttaattgtctcttcactgtttgcagccataaactgtgatgctgcatctgcgatcgctgcttcatcatcatctgtaagctctacgttataatccgcagccttctctttgagaatatacatcttctcaacagactccagactgcttgtcactgcctgatcaccataagtctcatctgaatcatcacctgctgtctgatcccagatattatctgcacttcccatataatttaaatacatggttgttgtctgctgttgttgttcgcgggcataaagacttacaactccaagcggaatatctgttccgtcaacagtagccactgtctttgttccatctaatgttttacttccacagccggaaagcataccaactgacatcacacctgccagtgtcacaacggctgttctctttaccatttttttcatttcttcctccatattatcaatctggtctttcttccataccactttcccagaatgtactgttattagagtataaacttttttcctgcgaagggcaaggcaaatcgaaaaatatgtagtatatttcacatattttccgccatgctcttaagctcctctgcaaattccgtcaatgccaggatcagattcccctgtggttccaggataaattttggttcctgctcattcttaaactgcagacctcttctgtatttctgcataagagccggaaagccttctgtattcagccttgctttctcataaagggtaaaccggactgtttttccagtctgctttatttccgttacgtacccctgatgagcaatcgcctttaacttcgcaatcgccagaagattcagcactgcctttccgggttctccgaaacggtccagaagttcttccagcatatcatcataatcctgttgtgtctcaatccccgcaattcttttataaatatccagcttctgaaattcattactgatgtaggaatcaggaatatacgcatcaacattcagatcaaccgatgtctcgaaatcctccattgtatgaatacccttcgcctctttcactgcttcattgagcatcttacaataaagatcatatccaaccgcattcatatgtccatgctgctgcgcacccagcagatttccggcacctcgaagttccagatctctcattgcaatcttaaatccgcttcccagatccgtatactcgcggatcgcagccaaacgcttctcagccgtctccttcagcatcacattctttctgtacatcagaaacgcatatgcagttctgttggaacgcccgatccttccccgaagctgataaagctgagaaagcccgtatctgtctgaatcatggataatcatagtatttacattggaaatatccagccctgtctcaatgatcgtggtggaaaccagcacatcaatatccccgtttacaaaggaatacatcacattctccagttccctctcactcatctggccatgagcaaaatccacccttgcgtccggcaccagcttcgcaatacgcagggcaacatctgcaatatccgtcactcgattataaacataataaacctgtccgcctctgcgcaattccctgttgatagcctctcggactgtctcttcatcatattccataacatatgtctggatcggcattctgtccataggaggctcctccaggacactcatatcccggattccgatcaggctcatatgaagagtacggggaatgggcgttgcagtcagtgtaaggacatccacatccttctttaactgcttgattttttccttatgcgtaactccaaaccgctgttcctcatcaacgatcaacaggccaagatttttgaactgtacgtctttggaaaggattctgtgcgttccaatgatcacatccacctgaccttttttcagatcttcgattgccttcttctgttgtgccggggtccggaatctgcacaacagttccacacgtaccggaaattccttcatcctctgcacaaaggtattataaatctgctgcgcaaggatcgttgtaggtgcaagataagctacctgtctgctctcctgtacttccttaaatgcggcacgcagcgccacttctgttttgccgtatcccacatccccgcagataagccggtccataatcctggtactctccatatcacgtttggcatcctcaatagcactgagctgatcctctgtctcttcatatggaaacatttcttcaaattctctctgccatacagtatcaggaccacagacatatccttccttttcctgacgcactgcataaagctctaccagttcttttgcaatatttttaactgccccacgaaccttgatctttgttttattccactcctgagtaccaagtttgttcagcttcggagcctttgaagcatctgcccctgaatatttctgcagacagtcaagctgagtagcaggaatatagagattgcttccgcctctgtattcaattttaatataatctttaacgatcctgtctacttcaactttttcaattcctcggtaaataccaagaccatgcttttcatggacaacaaaatcgccgatagaaagctccgcaaaatcctgaatacggcttccactgtaattttttttcttcttttttttctgttcctgtccaaaaatgtcagattctgtcattaccgcaaacttgaccaacgggtattcaaagcccttctttgcatggccataaaccaccatgatctcgcccggacagatctctctgtcataatcttgtccataaaaggctgccagtccctcttcctgaagatcctttgccagcctctcggcccttgtgcgggaaccggaaagcaacgcgatcctgtatccctgtttcttatactgatgaagatcttttaccagaagttcaaaactgttgttataagcgctgattgattttacctccaggtaaaatttctcccgcactttccagcctgcctgtttcggttccagcgcacatacagaaatacagttgcgtttattcagttctttttgaagctgttcaaaagaacaaagccagttttccggcagattccggctgcctttttcctctctgtgcatacggctctgtctgtactcttcttctacagccccgcctttctcagtcagtcggtttggttcatccagaaagattatggttctttcctccggaaaataatccaggaaggaaaccatatccttgtcccctatatgctccaccgccggatagatcgtaagttcttccagattttccagagaacgctgactctccggatcaaaactccggatagaatcaatctcatctccccaaagctcgattctccatggattttcctcagtgagacagtaaatatccacaataccgccacgcacagagaactgccccggcatttccacctgtcctacccgctcataacctaaagccaccagctggttcttcagctgttctatgtctacggtgctgtcactttcgtaatgaatcagctgttcttttatcttttccagagattccagaaaatccatacatccgtcaatacttgtaacaactgtcagttctttctcttccagtaacgccttaatgaccttcattctctgacgtatcagcagatttccatggatatctgcctgaaaaaacagaagatctttcgcaggataagaatacacttttctgtcataaaatctgtaatcttcataaatttctctggcgcggcgttcgtcctccgccaggatcagacgataaggcgcaatcccggaaagtccgtacatcagatgagatttctgcgattccatacaccccgaaacctgcaggattcccttattcgttttgcttttttctttaatctgttcaaactctgcaagcccctgcagaggtgttaaaaatgctttcatcttcacccctcatgatccttcgacgtaataaaagcggcttctgtttccagttaccgctttctataccttttgctgaacaatcatctgtttcctgtctgcttatttctgtacaggtacttttctgttatattcgttcatggctgcatctgtaccctgtgagattatgatatccacagcctttgccgcctttgttattgcttcatccacaagtttcctgtcttctgtggaaaatctgccaagtacatgatctgccagatcccatcccttcggctttgcaccaactcctactttgatacggagaaatttctctgtgccaagctggcggataatgtctttgatcccgttatgtccgccggcacttccctgcttgcggatgcgaagctgcccgggttccagatcaatatcatcataaataacaataagctctgattccggatcaattttaaaataattcgccatctcacgaacaggaccgccactcaggttcataaaagaaagcggcttcataagaatcactttctctccgccgatcatggttttaccgtacatggcattaaatttcacaccaccctgagggacattgtaatcctctaccagacggtcaacggtatcaaatcccatattatggcgtgttgcttcatactgtttcccgggatttcccaggccaactactaaatacatatatgtgtctcctgcttaatttaacaccattttccggaattaccatacctgtcctgatgtcaaatttattttttacatactctaaagtgtgttcaaaaaaccaatcctgcaaattgtaacgcacatcttgcggaaagcatttttcaaacacacgctaagataattaattaaaatataccatctcttccttaagcggctcgcattctttcacatcacttgcataaagaacaatgccctcaccctgatattctgtacggttctcaaatgcgaccttcgctgttacttctacccaactgccctctttgatatgcggtgcataatcgcttctgcacacgtatccaaggaaagtggtatcatctgcgcagcaggtcattgccacacgtcccggaacaaagaatttacttcccattccacgtggtttcatgacacgtcctttaaagcggacaattttgtctacatatttatccggattatccatggcatccacaaaccagataccataatcttccggtggaatctcaatgatcggtgcattgatatcaaacggcatctcatcctggaaaatgtcatccatctcgccctcttcattttcaaagataacctctgcactctgatttgcaaccttaatccctcgtctgtatgcaggaagcggatctccctctttacagcggttaaatacaaccatatctgtatttctgatcatatccatgaacagagatttcatgtttgccatataaacctgataagtagttgcatccacacaggtaatctcctgctcaatgccccagccttccggaagctccatctgctcaaacttacttacaagccacattccgttgtactcgatcacaacacgctccggctgatggatgatatccatggcagccagacgctgtggtgtcagatcttcttcatcctcgatcacttccacaactgtgtttgtaagtttcagtttatccatatcatattcttcttcgccttcttcgcaaaggatcaacagagttttgccgtcaatggcaaagtactcctgctgcagtgtaaaatccaggaaagtagtctttccgctttccaggaatcccgtaaccaaataaatgggaactctgatatcatccatcatataatttattcctttatctttattctgattctgttattatctgccgaaatcattcagtctcgcatctatgacacagaatttcatgctccgatgagctgaatccagatgcagtattttagaggattgccataaatcgctgcttcctcatgatcattatgcaagcccgaataattctgcaagtttatcttctttcagtttagagccgattacgcagagacggcctgtgtattccggtgcaccttcacggatctctgtttcctccggaaccatgtcaaaataaatccatgttccgtcttctgcaggaagcattccctttgcacgaagaataataccgtaatcttcagaagcggaaagagcctcaagcatcttctcaagaccttctcttgtgtatttcctgatcgtctcacgtccccagcttgtaaatacctcatctgcgtgatgatggtgatgatcatgatgatcatgtccgcagccgcattcatggtcgtgatcgtggtgatgatgctcatgttcctcatgatcatgtccacagccacattcatgatcgtggtcatggtgatgatgttcatgttcttcgtgatcatgtccacagccacattcatgatcatggtcgtgattgtgatgatgatgctctccatgttcatgtacatgtccgcactccgggcatacctcttcctcagacatcagttcttcctcaagagataccggtttctccataacctcaaggattttctttccgtccagtttctcaatcggagtggtgatgatagcagctttcgcattaattccacgaagaagttccattgcctgctgtgctttcttctcatcaatgatatctgtacggctcatgatgatcgcacctgcatattcaacctgattatcaaagaactcaccaaagtttctcatatacattttgcacttctttgcatcaactacagttgtatagctgttcagaacgatatccacatctccctgaacaccctgtactgccttgataacatctgaaagtttaccaacacctgatggctcgatcaggattctgtccggatgatatttgtccacaacctctttcagagaagtgccgaaatctcccactaatgaacagcagatacatccggaattcatttcccggatctggattcccgcttccttcaggaaaccaccgtcaataccaatctcaccaaattcgttctcgatcagtacaacctgctcatctgcataagcctctttcagaagtttcttaatcaatgtagttttaccggctccaaggaaaccggaaataatatcaatcttagttgccattgtcttatttctcctcttcgttaaaatttatatttctgaataactgccatatagccgtcattttttatattctgccatttttatgaacaaacagaataacttttggaactgccatcattatctgtctgtttatatatttgcctgtaacgtactcattatacataagatgtccaatgtattcaagtctgccatcaacgcattttgaccaggaaacacttgtgccccctggtttacagatatcctgcagctgttcaataccttcagaacaacctgcctgttcacatcaaagaaaggggcatgattcaccatcatgcccccgcctgtatacactaatgatcaaccgttgatcataaagctcattaatttatcaatatcgtctttctcataagcaacgatctcaagttccggaatctctccgcctgagaaaatgtttgccagagatacatactgggataatttagatttaaggttcagtctgtcaccttcgcctgttactaattctactctgccttcacagctgtcaactacagaaaaaaatttatcgatgtctttaatgttagatactttcatgttcattctcctttcaacatggaaaccattattctctctattccttgtgttcgcgataattataacgcagataaatttcaaaagcaattatttatatttcacgaatttttcatatattatcgggcttaccctgcaatattgtcaaataaataacatgcccctgacaataattctctcagatattcacatataccctgaaatcatccctcaaaattaatatgtaaaaatcgcaaccccataagccggcaacggatatgcgaaggaaaactctctgttatcacattcctgtttcactgccttaaatgtctttggctgctccagaagtccattctcgtccataatcagcttgtactgttttttcttcggaacaccaaccctgtaatccggacggtcaacaggtgtaaagttaactatgtaaagaatattgtttctctttgtaggagactttctcacaaagctgaaaatacttctgtccccgtcatccgcattgatccactcaaatccttccggattattatcaccggcataaagtgccggatatttcttataaatagtcaggagatcatgcacataattctgaagttccttgtgtggctcttcattcagaaggaaccagtcaagttctctctcctcactccattcacgaagctgtccgaattcctgtcccatgaacagaagcttcttacccggatggcagttcataaatgaataggcagcctttaaattcctgaatttgtccggtaactctcccggcatcttctcaagcatggagcatttcagatgaaccacctcatcatgagaaagaactaatacatatctctcactgtatgcatatgacatggagaaagtcatcttattatgattaaatttacggaaatacggatccagcttcatatattccaggaagtcattcatccatcccatattccacttcagactaaaaccaagtccgtccttctctgcatcccctgtaaccatcggccatgcagtagattcctcagcgatcatcacagttccatgattccttccaagaactactgtattcagatgcttaaagaattcaatagcctccagattctgatttccgccatatttatttgcgatccattctccatccttcttaccataatcaagataaagcatggaagcaacagcatccacacgaagtccgtctacgtggcactcctccacccagtaaagggcatttgcgatcaggaagttcttaacctccgggcgtccgtaattataaatcttggtaccccagtccggatgttctccctgtctcggatctgcatgctcatacactgcggttccgtcaaagttcgcaagaccatgggcatctttcggaaaatgtgcaggtacccagtcaaggataactccaatcttattctgatgtaaataatccaccatatacttgaaatcctgcggcgttccatatctggaagtcggtgcataatatccggtcacctgatatccccaggaaccgtcaaaaggatgctctgcgattcccataagctctacatgggtatatcccatttccttcacataggctgccagggcatgtgcgaattctctatagttataaaatcctttttcgttttcctctgactgcggatgcttcttccatgaacccggatgaacctcatagattgccataggctctacctgctcatcaaacttctctctgttcttgatccatgtggcatccttccatttatagtctgtgatatctgtgatcctggaggctgtacccggacggagttcagcttcatttgcatagggatctgccttataaagcttctctccatgcgcacccacgataaagaatttatacagctgtccgatctttgcccccggaataaatacctcataaacaccgatcggaccaaccttctccatcgggtttgcttcttcctcccagtcattaaattcaccgattacagaaacagactgtgcattcggcgcccagaccgcaaaatatacacccttttttcgtctgtatgtagtcggatgggcacccagtttcttatatacttcataattggttccctgtccaaataaatattgatccaaatccgtaaatttcatactcacacccatctggagtcctcccttaacttcggtttctatcttttttgcagatactgattccataaaataatactgtaacaggatatcttacgttactgttcactccattctcagtaacgtagccaaaattcattccagattgcctgcggcaatggaattttggcatatgaacagtaactatcttacagcaagttcaatcaggaatacgaactgacttttagtcattctataagccttattataccaacggacattccatacgtcaattaaaaatatgtgtatatttaacaatttttttatatattttatgtgttttttgtaaaaaacataaagagcaaagaagtacctttgctctcttctttgctctttcgtatgttcgtaattactctgtatgatccacactgcaggattgcatatgttttttattccgttccatctccgtaatctacagaatcatcactgtaatcttccgaatcatctgaacttccatcatcataacttccgtcatccgaacttccatcatcatagcttccatcgtctgaacttccatccgaataatcctcacttccgtctgaggaatctgtgcttccgtcagaagaatctgcgcttgcatcagatgtaccatctgttccgtctgcagaagctgctgcatcggaaccgccctgatatcccggcacatctccattactgagtgtactcggccagaaatccacataacatgcattctgtaaggtcacattcttggcttctgccatctcacttaccgttacaagtttatatccctgtgcaataagatccggtatcaatctcaaagcagcctttacagatggctcatgaatatcatgcatcaggatgatagttccatctgtcagatctccattcattactgcactgtaatccgcatctgcatccaaaagtttccagtcttctgtgtccagtgaccacataaagaacggcttatttacagtattataaatatctgaatttccgtccccgtaaggcgcacgcgccacactcgcagcctggccacatgcctgaatcaatgcatcatctgtatcagagaactgctttgcaactgcgtcaagatcaattgtcgtcaactgtgtatgatcccatgaatgacttccaatctcacagccaagttccagcatacgttttggcgcatccggatatgaactgacattctgaccaagcataaagaatgttgcatgagcattattctgttccagacaatccagcagttcatctgtatactctcccggaccatcatcaaaagtcagtgccagcatcggacgtaccttactcggatcataagatccgtcttcattaaagtaataatccttcactcccttttctacccatcctgtctgtatatatccgttttcgtcaaaagaataggtaacaccatctatatcctgaaatccatttgaaaaatatgtaccatctgtattctgataccactttccgttagcatcctcatgccatccggctgtcatcgcggcaaccttatctgtatctgatttacccttcaatggctgtctcactgcagcatcagaatttgcctgaacttcctctgtatctgcctgagcctgtacagtctgatcactgtttccgcctccggctacatgatgtgcgatcggaataataattcctctcaccataaacaccaccgccagaatcatgccaataacacaaagtccgatctttgtataatgcctgatcatcatctggcgtttttttctgcgcattctttcgcgcaacaccctcttatccatggtttcctttccccgcttctttttgttaattagtccctgacagcgtacatcacagtacggagtaatccacttttatcaataatcataactcatttatcaggtaaatacaatgccaattattcactctgatcaacatcttccgtacctaattcctcttccagattctcatctacatctgaattgtcctgtccggaatcatcagtatcttcatctgatacattctgatcactgtcctgttctgcattttctgccgcagcatctgcatcatctgccagcacatcaccgtttgcgactttctcactcacactcgcattttttataatgaactcctccactctgagaagtccgactgattcatctacataatcctgtccgtaagttccaaccagctctgcaatactggaaacacccatctgttctaccagtttatcctgcagctgaaggctctctttgtcgtcaagtgacagtccctctgcatccataatcccctgcacgatcaggttctgcttaaccttaccctctgcatactgctgacattgttcatcaaaatcatcctgcgaaataccctgactgtctgtaaactcttccagagtcatgtcggcctgttttgcataaacttccatactcttcttaaattcagaaacagccttatccacatcttcctgtgggtattcttttacttcagagttctcaagcactgtactccatgcagtattcttaagaacctcctgcgcagattcctttgcgtttttctcaagttcactgcgaatactctcacgataatcatctactgttgtataatcagtgttctttgcaacccattcatctgtaagttctccttcacgccgcacgttctgcaccgtaaccttgtatataacttccttacctgccagagtttcgtctgcatagtctgacggaaaatcaattttaatctcctttgtgtcaccctttttcatcccgatcacaccattttcaaattcctcaaacatctgtccgtcgccgatcacaaagtcatagttattggcagtaccgccgtcaaaagtctgtccgtctttagtgcctgtataatttacagtcaccagatccccttcttttgccgcatcagatacaggttctgccttatctttcagattctcatcgatctgcgcctgtacatcatcatcagtgatcgcatccaccgtattgtccagagtcagtcctttatattctccgatcgtaatatatttctctacattctcaacagacacaagacgcgtagttcctgtctctgctttcttcccgtcagcagctccttcggtctttgtaccgtctgtgataacagcaccgccattgccacacgcagatgctgtcagtgcaaaacaaaccgcaagcatggcaagatatatttttttcttcataataatcaatactcccttctacattccaggtaccggagttggtcttgaagaatcccatacttccgatacatcaaaaagatcactgagcatttccggattataatacattctgtatccatccagatttcttcttccctgtcgaaaataatcatctgtaatctgtacaaaatactgactggaatctacattacagaaatagcggtatccctgactcttataaaactcatatttctcattgtcggccgaatatccttcccagcttccgatatccgcaccaaatgcaaaaatgatcatatctgtttctccaagtatgggagccacatatttcttccattttttatcatctcttttcagatcatccagagaagtggcagccacatccttatgtccccatgtatggcttgcaaattcccagccttctgccttcatagccttagctaccttttttgcatttttcacttcctgcttatagttaaaatccggatgatcttccaggaattttttctgatcatcctgcagtttttttccggtcttatatgcaatatccgtacgatatcccagaacaccgtcataacctgtcattgcaaggattccctttcttccatgataggaaaaatccggatgttcttttacaaaagtatcgatcagcggaaccatatcataatcccctgtggaaacacttccgtcatcctcaatatattcgttcttgacctcaccattggaatccactacaagtttcgatgcgaaaccatctccgtccatatagtgataataactcacatcatcctgagaaagcacaaatggaatttttcccggcggcagcataatactgcctctggacatagttccgtcctcattgataaccgccatgtcgtgcggactgaccatgacatatcccttatcatacatactctgtatgattttgttaaactcatcaattgttgtcatatactggttatatccattactgtctgaatccccgtcaaatgctctggcagtgtctttgatcagtgtatgaaagaacacgtgcgtgatctgctccagcggatattctgtacaggtggctttcgtattttcgtaatccgcaactgcactctgcatatccgtattactttcgtaatccggctgactcttaagcagttctatggcgccatcataatcatactgtacagccataagcgctgcctgctccataggattttcctgtttctcatctgcctcttctgtatcttcgttgtcagtctgctctccctcattcagaccatcatcctgctgtgtatcttctgtacttttctctgtatcagcatcctgttcatcaattgtctgctgttctgtttttttctcagtttccgcattttcagctatggaactcagaaatggaatatcctgttcaaacggaatgagcccacatccgcttactcctaacgaaatactcaaaatagctgctgttacacatgctatcctttttctcatatattgtcccctttcagttatgcacagagatcatactcaccccatagttggaaccggcaccggtctggaagaatcaaacacagactgtgcatcaaacagatctgagagaagttccggattatagtacattctgtatccgtccagatttcttcttccctgccggaaataattactgcggatctgcacaaaatactggcttgaatccacattacagtaataattatagccctggctcttaagatattcgaacttctcccccgaataatcttcaacactggtaagatctgctccaaatgcaaaaataataatatctgttccgcctatcagaggatcaacattctctttaaacttctgtgtatctgcctgtaatctctccagactgatctgacttacattctgatgtccccatgtgtggcttgcaaacagccagccttcatctttcatagcctgcgctactctggctgcattttctctctctgtattcagattaaaatccggatgctcatccagccattttactttatctgcatccagatcatccggacgggtttcataactgctgtctgtgcgataaccaagaattccattgtaaccggtaagggcaacaattcctttagcacctctgtaagaaaaatcaggatgttcctctacaaaacgatcgatcagaggaaccatatcataatcgcctacggaaatactgccatcatcttccacatattcattgcggatttttccttcctcatctacgataagtttggttgcaaatccgtccccgtccatataatgataataacacacatcatcctgcgaaagcacaaacggtactttacccggaggaaggagaatctcccctgcattcatattcccattttcatccgctgtcgccatgtcataaatgctgaccatgacatatcccttatcatacatgctctgagtaatctggttaaattcatcaatcgttgtcataacctgatcgtaatctcctgacttgtaatccccgtcaaaagccttaccggtatctttgatcagagtatgataaaagacatgtgtcacctggtctaacggccaggaaacgcaggattccttctttttctgataaaccttaaccgcatgctgaaacttctcacttgtctgataagtctcactgttttgcagcatacttatggctttatcataatcatactgttttgcagcatactttgcctgcctgtaaagagttttgtcctcttcactcagtccatctgtatcctgaacttcaggtgtcaccgcattctcagcttctgcctctgcatttgtctgctgagctgttttttcttcttctgttttcctgtctgcagatttcaccatctgcgcaatcttaacctgctgctcactgacaaaattctgcagttcttccccgtaaaatcctattccaatcccaattgcagcggccgccaccaccactatgcagcctgcgatacgcagtcttttttttctgcggcgaagtttattgcggcgttccagtctggctgccctacgggcttcataagctttattatcatcaaaaaagaaatcttcgtcctcgcttgctgccggaggttcttcgtttatctcttctgtatttggtttttcttcatttagtttttctacatttggtttttctgcatttggtttttctgcatttagctcttctgcatttggtttttctgcatttagctcttctgcatttgtcttttctgtatttactttttccttatctgaaagtcgctcctctttcttctcagagtcgggctttaattcgctcatgcttttctcctttttatcatatccgttttttactcacaaattattctgtcacaaaataactcctcaattcccgttacatatattataaccacacatcatgattccatcctgtaaaaatggctttaactgttccgcatatttcccactactgttcgctccggcaaatattgtctcattacagttttgctacaattataacctttcataatgtaaatttctaccgctttccatccattaattctttttttgcaattgcgttttaccttatttaatgataaaataatttttatgcaatggactgtccgtaccaacagtccctgtgaaaacacatacattagggaggatgcaaatgagtacagtaacaatagtccttctggtcattcttgttatcctgatcgctgcactgatcggtttatatttcttcggaaaaaaagcccagaagaaacaggaagaacagcaggctcagattgaagcaactaaacaaaccgtttccatgctggttatcgataaaaagaggatgccactgaaagaatccggacttcctcagatggtaattgaacagacacctaaacttatgcgccgttccaagcttccaatcgttaaagctaaaatcggaccaaagattgcgatcatgatcgcagatgagaaggttttcgacctgatcccgcttaagaaagaaatcaaagccgaagtaagcggtctttatattgtaggcgtaaaaggaatccgcggttcccttcagacaccggctcccaaaaagaaaggtttctttgcaaaattcaagaaagacaaaactgccagataaatgcagtcagacatataaactaaaggtcagtgaatcgtgtcatccatatacacagatcactgacctttttctgttttgatcagacagatatctgcagcgaagcagagaacttaccagatctgatcaaattgtaaaattcttacagtcctttggctgtgccttaatcgcaagataacagtctgccacatgctcctggttcatatcaagcgcataatccactttcatgtcaagaccgccatcactctcctgcagattcagattcgtcgccgcaatccccatttcaatagttccatagggagtggtatagtaagtcatattcttcttaccctgttcaaaaaccatatgaacattgaccacacctttcttgcggacctccattcccttccgggaaatttttatgtaattgacggtaggttctgcaaaatcctccatgacttcctcatagcgcagataatgacttccgttccggaaataatactgtcccggtacaacaatctccagaggttcctgttcaccgtctgcatccattgtctgaagtccccttacatgaatcagcacttctttatccattcttctcatactcctgtttttatactgttcaaaacctgtttttatgtatctatattataaccattcagcaatctgctgtttttaatacttctcaatatctatttttttcgtcatctccacatcatatggaagaatcgaattggcaaatgccttaaactcatctgccagatcactcacatagaagcgatacggaaattcattcttctctgtaccttcaccggcaagtcctttttcctccagaagccttcccagctccagtgcggtttcataagccggattcaccagacatactccgtctcccatgatctttctgatggtggaacgaagcaatggataatgagtacatcccaatatcagtgtatccacctgcttatcctgaagttccttcagatatctggcagcgacctcatcagtcaccggatcatgaagccacccttcttctaccagtggcacaaacagcggacatgctttgccgaaaacagtaatctccggatccagatgcttcagatactctgcatgtatcccacttcctacagttcccacagtaccaatgattcctaccctcttatttcgggtctgggcagccgccactttagcccccggctctatcacgccaatgatgggaatgtcaaactcatccctcactgcatccagggcaaaagcgctggctgtattacatgcaaccacaatcgcctttacctgctgctgctgaagaaaacgaatgatctgccgggaataccggatgatagtttccttcgatttacttccgtaaggcactctcgccgtatcaccaaaatatacgattttttctgaaggaagattacgcatgatctcacgcgcaacagtcagccctcccacaccggaatcaaatactcctatcggtgcttctctgtctattttcattgatttctattctccatctctattgattgtctcactattctatcaccaatcaagagcctgtgcaagccagaaggatatctttatgtcatctttctgtcctttattttcctcagggaactgcgagaagcagaatttcgggtacaatgtcccccaccatgcagtaactgcagtctgttcctgtcgtctttcagcgatttttgctatcttaccggacattcccggcattgctctcatcataagaacaccaacagctgccacgaacagaacaaacgacagttttcttcttaattttttgttcttactctttttattcatcattgtccctctctcctgttatatcttatcagttaccatatctgcctttgttattttcctatatattttcttattttatatggaattttcaggcagcactttaatatttgaattatgccaatattttcctgatttatacttccacttccagacttccatttctgatcttcacaatcggaagccgcaggattttatcttctttatatttttcatagaaaagctctctgagtgtcacagccgtaatatttcctcctgacattctgtttcggatcagtcctgtaatatattctcctgctgatgaattatcctccccatgccagttcaggatctcccctgcgtcctccgcttcaaacacataaagatcttcccccacaaaaatctcctgtttcagataatccagcaccattctccatcttccgtcctccaccagtgttctccccatgaccagaacctgcagatgccccatatcaagaagtttttcctgtgactgatcatacattttttcaatccgggtgaaatcagcaccactgatctgcagaacccgggaaccgccatcttcttcctcttttccctgccccgtactctcagaaagatccggcatcccataggtaagacagattccttcttctgaggcatccacgccaagtgccataggatacattctcttctccggttccacagccgcaccacatccgctcataaaaagactgactgacaaaatcccggtcaccacaccaactgccctttttctctgcttcctgcggtgtccctttcctctgataaacatataaaactgacagatgagaattcccgggacgaaaatatgcgccagacaccatccaaaataatccattattccttttccctcttcttccagaagcgaaatcaggaaaaccagtgccggaagccagaacctccccgtaccaggatgagatttcccgataatatgatttccataatacagcagactccctattgcaaaaagcaggctgtaaagcagaaatcccatccacaggatgtcaaatctggccagtacatttcccggaagatctgcgcctgccagcagaggcaggaccggataactttccgccgctaccctgtcatatcccagaactgccggaagcaaaagctccattccaataagaataccgccaagtgtcaggatccctcctgccaccgtctttcccgcacttccgtatttctccacatttcccaacagaaatggcagcaatgcaaccggcgaaaaagcacacagagttccataaaaagactgactgacatttctcactgtaagctcctcccaccggatttctcccatgagatattccgtttttgcctgtggcacacaaagtatcatcattatcataatcccgccaagaagcaggccacctgatacttccgccattcttcctcttctctgtacacctttgcaggttccgacagaacataccagaaccgcccagaatgcgatccatcggccggatactcctgtgatcagctttgcaggaaccagcctcctgagaagtgccagcagatatcctcccgccatcaacacatagatcagaaaaaaaatcccgatcagccttcccgcaaaagcacctgcagactttaccggatcttcaaatgaaggtgtcagccgtatcagccagattacataaaacccaagcaatatcagcgcaaaaatcattcccgccactgcactgattccgttcattccaccctttccgaaaacgcagagcataaatggtgccagtaatgccagtatcatctgcctgtacagctgcctgtgggaaattctgttattctctgcaaatctcatgaaccggactcctttctcttcaaacggatcttctgctcttctcttgcataaagcggtcgtaataccctcttgcgcagtggaactctcagaaccccttctcctttgctgcccttctgttctttctttataaaaggaaccagataaggaataccaaaacttatcaggcctgccaggtgccctataaccagatatactcccagcacgattccgtaaattcccagataacctcccaggatcagaaacccatacttcaccagccgaaatgctgctgcaaactcttcatttggaacagtcatagatccaagcgcagtcaacgccacgatcatcaccacgatcggactcacaagatttgcctctaccgctgcctgtccgatcaccagtccgccaacaatgccaatagcatttcccagagatcccggaactctcaccccagcctcccgaatcagttcaaaagccagttccagaaaaatcagttccaccacactggaaaagggcactccttccctcgcctccgcaaaagacagtatcagtgcagatggcagaatctgtgtatggaaacgtatcactgccaggtaaagtcccggcagaacagtcgccatgatcacagccagatatcgcagtattctgagaaaggaagccatctcgaacctgtgataccagtcctcgctgctctccatgaaactgctaaaatttcccggaaggatcaatgcttccggagaattatcacacagaatcacaaccttacctttcaggatttcctgcacagcacgatccggacgttccgttgtctgatactgaggaaaaggagaataccacacatcttctgtcagctgttcaagcataccgctgtcaaggattccgtcaatctgaaattcttccagccgttccttcacttcttccagaagtccctcatgtaccagatcgtccatgtataacacctgcgttaaggtatgagaacgcacaccgattttatattcctccaccttgagtctggtatcacgaagcctttttcttaccagtgcactgttacttttcacactgtccgaaaatccttccctggaaccccgcagcaccttttccgattctgcctccatcacacctgtggatggataacctttgctggagattttcatcgccttgtcatatccatctatgaaaaacactgcattccctgcaagcatggcatctatggactcgtcaagattctccagtttctttacatctgcgatcccaagactgttatgcctgacaaattcctgaatatcctccggcgaaatctcccagaaatgattgatcatctttccaagagcagaatcatccagcatcatgttggaaaccgcaacttctatatagaccataaggcagtccaccttatgtttatctcccagccgcatgggacggatcagaatatcactgcaattttccagtctgcttcgcagatatttctcattctccctcagatttgcagatactttccgggattcttccagtttcttcaataatttcccacctcgtttcataccggtacatcgttttcgatgtaccagacagatctgttgccaatcggcaatattcataaactcacttatacacacatggatgcgcaaaaaaagagaggcatcccgcctctcttagaatttcccgatattcagatattataccattcttatctgtgtcccctggatttctctttctctgcacgttcacgttctgcattctcagcctcaatagaacgcatgatagccattctctgattctcgatatgctggaaagaaagctgtttcgcgcgttccacgtcacgctctctgatcgcctttgtcagttcctcatgttccttcaccagaacatctcgtgtttcaccttctttcagatattctacacgataacgataaatctgctcacgcatattattgagtacctggatcagcctcttattatcagaagcctgataaataacctcatggaatgcaacgtcagcctccgcaagcttaacaagatttccctctgcgatcgtatgttcaaactccttggcagcaagccagagtctcctcatttcttcttcagtcatacgggcacatgctttctcaatagctacattctcaagagcaatacggacctccagaacatcattcagatccttctctgtgatattggcaacctgggcaccacgtctcgggatcatcactaccagaccttcctgctccagcttacgcattgcctctctgataggagttctgctcacgccaagtctctctgccagcgcaatctccatcagtctctcaccaggtttcagttcgcccttcaggattgcctgacgcagcgtattaaaaaccacatcccttaatggaagatattcattcatatttactgaaaaatcacttgtcatttgtattccctcctgctttcgttacttctgtggcaaaaaccgtcttcgccagccggctctctctgagaacctctgctgccgcatccatcttctcacgattatcaaagattccgaacactgtaggaccacttccactcatcatcgcctttaacgcaccatgactctccatcagtgctttgatttcgccaattacaggatatttctctataattcccggctcaaaaacatttcccatcttctgtgtcattgccagaagatctccacgttctatatctcctatcatcccgtcaatatccggatgagaagaaatcttatccagctgaaggctctcataggcagctttggtggaaacattgattccgggcttaccgatcagtacaaaacagtccggcacctgagtgatcctggtcagtttctccccgatcccctttgccagggcagttcctctcatcacacagtacggaacatctgccccgatattcacagcacgatccatcagctctttctggctcagtcccagtttaaaaagccggttgatccccaccagtgcagctgccgcatccgagcttccgcctgccatacctgctgccacaggaataaatttctcaagatggatatccacaccacccttaacctgaaattcatccatcagaagcttcgccgccttatacaccagatttcgttcatcattcggaatataggaataattgacagacagggaaatccccggcttcctcaccctcttcatctccagaacatcatacatctgtatcgtctgcatgatcatccggacttcatgatagccatcctctctctttctgagaatatccagtcccagatttatcttcgccaatgcacgtaaacgcataaaatcctccgtttccaacaatatcatccgtatataactgtactttcgcaattatatttgtactttgtatacaataaaactctttgcgcatattttaaatcatttttttttagttttcaatataggagttttcattttttccggaaatttttttcattatcatccctgcctgacaagaattaacgactgccccggctttacctctttttccgtaagactgttcacacccgaaatctcatccacagttgtataaaatttctttgcaatatcccacagagtatctccggcctttacaatatagaccgtaattcccggcatactttccagtttcttacgatccagcggctgttcttccacagattcaataagctgctcttcccactgtctgaacacaagcacattcagtcccaccgccgccttgacttcaatctcatccccatctgccattgcagtggaaagctgttcaaggtcagcctgaagtaaatatgtgcaatccttcccgatctcttctgcctcgatcagatgggtaaacggaagcatggcatccatagaataaaacggcatttcatcatttccaataatatacaggatcttgagtgccacaattccttctgccacaattcccttatccgtaatcctggtcttatctacttttaccttaccactgctgtggcaaagctgcaaaacttttccctgactctccttaacttctatccggtctgtcagacgacacctggaaaaattccgtaccagaagactttccaacatttcctttttccgatgaagaacacattctttgtatgggctgtatgcatcaagaagaagttcatgctcctcttccctgtacattttcatatttaattccagtaccacatccacctgcaggatacgttcttcaccatccggatcaggctttacctctatcccctgatgaagaagagacacctcaatatgtgggatcagatcttccatacagccactgcattccatctcattggaaaaaggcatggtatactccagccactgaggtggattctcctcttcataccctgtatacagaagaaaaactgcaagctctcctttcacccggagtttgttctctcccggccgcaggtccagattcctcggttcagccatataccacagaaggttttctacattcggtctgtttgacgcaagagtaatatcatccttaatgcgcagagtatcttttttatgtacacgaagactcataagccggactttctccgttttcacagagacttcctgatcctctgcggaaaccggaagttcaacgactgccagttcatctaccactgcataaaaagttacaattgctttaatattcagttttctggaatggatcatatgaacactgagatcctcaatctcccatttcagacacagcttatctcccccttcgattccctccagattaatcatctcatccagcggaagcttcgcagaaaggctgtaaatcctgccctctttttcccccacataaagcaaatctgcatttaatgtccctttaagaagcgctcttccttcactcagcctcacttcctccatggaaacatccgctttgctctgcaccagtctcccgatatccggtttcacatcgggcacattatagtcctcgtcaaaagtcgcctgcgctgccgctttgtttttgatccgcagcatctgaatactttctttttttaattccaacctgcttccttcctttctctgtttactttatgataaaacccaaaaattctatcggtttctctgtttctctgattttcaggacaatacagggataagacggttcactgcctgcatccgctttctccggacctatcagccttgtcttgcagaatactgcgttctctgattcggaaacctcctctacctgaatactgtaccctcctgtaagctgctctccatatcccttcatcagataccttatatctcccacctgataggtcatctgaaatactttctttttcttctgttccatcagttctgaaatctcttccggaatttcctcctgctttacgatcgtatattccagaggtgtacgttcgccctcctcaatcctgataaactgacagcccgccggcaaaagagccaacagcaacacacagagcagtcctcctgtccttttgcccataatgcacccctgctcattcttcgctaaatattctatgccggatacagccctgttattaccatactctatgctatatatccgacagtaactgcttttctgcaggaaagaatcctgtcctgagtgctttatttaatgccaaaaaatcattatactatgatttatttcttgcaggatatctcataattccttataataacttctatacttatatatgggcatcagcattatataatgcccggaaaggaattaacgaatgatacgatttatcctcgtctgtattgttgtgatcggatacctgatcctgtccatccccatcctgctggtcgaatggatcatcggcagattttctcctgaaaagaaagatatcagctcccttaggatcattcaggcagtattccgatttatccttaagatcaccggtgcaaagattactgtgatcggagaagaaaatgtgccaaaggacacacctgtactttatatcggcaaccacagaagctacttcgacatacttcttacttactcccgctgtccgatccgtacaggctacattgccaaaaaagagatggagaaaattcctcttctttccacatggatgcgttatctccactgtctcttccttgacaggaaagacatcaaacagggactcaaaacgatcctgaccgcagtagacaaagtaaaatccggaatttccatctgtattttcccggaaggaacccgaaacagaaataaagatgagctggacatgcttcccttccatgaaggaagcttcaaaatcgctaccaaggccaattgcccgatcatcccaattgcgatcagcaattcagccaacattttcgaggcacacttcccgaagatatctcctgcaaaagttgtagtagaatacggtaagccgatctatccggatgaactgagcaaagaagataagaggcatgtcggagaatatacgcaaaacgtaattcgcgaaatgcttataaagaacaaaccactgaccgaaaactaataagaccatcggcagagcgtaaagacaaaaatttacgctctgccggactgttatatatcagaatttccattgtatctggactgatccgggaaataccttaagtgacctgatcatcttatcaactgtaaacctcttctcctcaaaatcaatctctccccacagacttatattagatgctaccttttccatctgctccggtgtcgcatgattctccgcaagcaccgataatttctccagctttaactgatgtatctggtctatttcttccactctctgattgatataatctgtcagtgtttctccggcacctgccagagaatccacaagcagagaaatctccttttccatttcctcaatctccctgtaaatctgctttacctgcggattttcctttaacttcgtataagcggcaggagactgtccttcgcgcagcttacgtaccatctctttatatacataattctccacatcttcagtataaaccttcccgcaccccggacaggctttgttgttcagacgcttcgtacatctcaggtactgtttaccggactgtattttaatactcataagtgcgtatccgcaattgccacatttcactttccctgccagccatgtattcacagcttttcggttggcctgaatc
